United States Patent Application Publication US 2023/0390346 A1 - sequence listing, part 12

SEQ ID NO: 16 - DNA, 4089676 bp, Bacillus subtilis (residues 2,044,839-4,089,676 of 4,089,676)
gatcttagagttagagttgaatatacagggactgtttacttaggacaataataaatgaggggcgactagtcccttatcttatttttagttaaaaactatcttttattcaatctctatattcaacccagttgatctaactttgatttccctcatctctccaatctgtggcatatataaatgtttcttttcattagaaacaatttcacccttccaacaaccgttttgcacaaaggattttgtcccgattggtaaagtttgaagatctgcgttctctatgtattctccctcctctctataaatatctccttgttcagaaatcctccttttcgaaactttaatgtcgattttgtaaagtgaattttcatcctcaatcattaatttatatagccaatcagttatttttgattgctcttcactaccgttaaccatatcgaaaatcttcctgtacatgtcattcctcttcttttgaaaaatacttgtctcacctctttaatagttaaagtttcttgattttgcacttttccactcattaactatccacttcatatgtattcattaatttaatgataaaaccacgattttaatttaactttaatatgcaccatcttgagaaaatcccctttaattggtaaactcatacttaactttttatatacaagtgggtgttgccttgaataaaacaatcggaattgttggattaattatcagcatactagtgcaaactttttcggccgatgaatcgctatcgcataagattgctacggctttgttattggtatcaataatgatttataattttgaacatgctaaggattattctaaaaagtcacttgttattttaggagttacctttattcttttgatgctaggagtttatcaactgctctcatttaccagcgattactttgaaaagcttaatgtgaattttagatataccctcttatttgaaatagcattaattattgcattggtaacgattgcagtaaatgtaatgaagtacattgcgaatcggttaaggaaatcgactaatggtaaagagttatagctctttgccttttttatgctaaatgcttctttctatgcggtcttttatgtatgaaatcaaatgctaaatcaacttttctctggttccctttcctctgttactcgctgagtaacaacaataagttgaccgttttcttgacgatcaatactcttaactgaatatcctttagaaccgtaatattctccgataatctcatcaacgtggttactaagcagattcctctttatcacctgaaaaacctccacttattttatttttattctttattttttttatgatttcatcctataatccatctctccatttgccctctcctctatcacgacattaaccgacacacaatttccatatatatgggagtaatttcgctatttccccaacagataaatccatataatgtaattgtaagaaaaaattataagaatgggggatttacatgagttacaaaaaagtaataacaggtgttgcattatctgtaggtttacttgtttcagcatctccagcgttcgctgcaagtactagtcccgataaggaaatagtaaatgttgcaagtgatgattttaaagctcaagctatcaaatgggatctacctagtactactggtatttttgccaatacctttgaaaaagacggtatccgctggtatttaaaaggtattacaaaagtctcggaaggaaattggattggccactatgaaggtgtacgaatataagatcaaaatgggggggcatctagctccctttttaaattcatagtttgccagctctatctggttaaagtaatccttttaaacatagttcaaaagcacataccaattttgtatacatccccattaatacatctccctctctttaaaacagtctttttatcaagtgtagtgctactcataaacaacaaagacattatgatcatcaacaaacatttcgctgccatcagacaagtgtatccaaaaagcctcctctggttcatctctatagtcataaattgcgactacctttgtatttgattcttcactcactgactttctgacagttatttttatattatcttcaggcaaaataattgatttaatcattcacttcaatccaatcaaggtttgtattgcaccgttgtgcttcaagtaacatctagtcacaagattgaaccttattcgttaatacacttggtcccaacttttctgttctagcattagaaagacgcacttgaactttaacattcttcatttcggctgtaattgagtcaatccttccagcccaactaggactgtcttcaggtgtaggataaagtttaaatcgccaactaatctcacctggtttagaagcaaaaccttcgtaggtatcgtaatttccatatgaagatggttccggaagatgaacagcaagaatacttatattggttcttggagcactaggcggatttaattgcaccttataaattaatgccacgccttttacatttctaaggctctgatcaacaggttccattattacactacaaggcattgtacttgcttttacttgaattggataggcaacagcagcagccaataaggatataaccaaaataaatcgtctcatggagagttcctcatatttttttggttaatttcccttatttctggatcgattattcatatgtatttgatctggacttcaattttattttgatttaatttcaacagttaaactgtctggatagttttttaaatcaagtgcgtttacatgacagtgacctacattttcttctttatcaacgtaattatagaagaacttttccccattattgatgatgacttcgccatgatgtatgtactccatctctgatcccttgtaccaagttaccttaacctttgtgctaggtttgattttatttaaatcaaatactgttatttcttttagcaagttcatttttttaacctcctcttctcttttacttttaatctaattccctcatgtcctcctgctgctcaatataacttttaaagtcctcccattccctatcaatttctttaatattcctagcaatataggtttctgtaatgtctggatcaaccaacttttgaagagaaagttggtacataaattcaatctttgatactgtttctagaaatgactgggcataactttttgctctatttaagcgatattgactcattccatgttttgattcctttattattctcactcccttttaatcacattaaaatgcagcttttatttagacttcatcagcttgtctaatagtgtctaacaactctttcttcttgaaatatgtctttttccaaacgatccacttccttttgcaattcagtagcagcagcattcttcagaatccattctcctactccacagacttccttttgttctttctcaaacgtttttatatgttgatcttcgaacctaacccttactcttgttccgttttcaaattcattattaaaagcagctgctttcttttattcttcaagctgcttaatccttttgttgttgttaaatgagttacttacaatatttcctgattcacgagtagtacttataattaataatggaaagcttatatcacctttaggtcttaaaggtacgttgaggttttgactcggttagtaacttttggagaggagttgctgaccatctttttcattaaattaattgcatacagaaatttaataatggaggaatttagattgctgcttaatgacagagattgctgcttaatgacagagaacgttttttgcttgagtatcttcttgtttctaatcggatcaaatcgtcgtttgataccttctaatatactcactatctctgtcttttcttcttcaagaaaagctccaagaaaagatccttttgaaaattctggtttaaaggatctaggactatctatgagctcaccatttgatacaaatatactcagtcttatgtccttcgatgtcttacggaagaactgtttgataaggctagagctctacatagaaatatcggtgagcgtgtttactttttaaagtctgacgtctgcattttgtatcatgagtggatatcgtgacatccatttgctgcgacttcttttcaaatgaaatgaccaccgcaaaagaacagattagcaagcggttgtactataataaacacctaatggatacttattttaaaggaaagattgaagagcataatgtcattacggattgcgacattgataaggtgttacataagatgtacttaagatttggattcagagagtataaacgaaacaattatgagcatgtctttgatcttttgggtatataataagtcttatactgctttttagtaacaaatattggatttcgagtttttttcggctgactcacaaattcgaatgaaaatcaagggcaaaattaaaaaaatgaataattaagagggtgtataaggcttaatattattaatcgttaccgtaacagcaaaaaatgaatcgaagacttatttttatgcaaattggcgaatatcaataacgtcttagtcataatacttaataacctaaagcaaaggctgaatttatgaaagggttattttagatgggtacatataatagaagaaactcgtcacagataaatcatttagatggacggtgaggaacttaaataagctgcagaaggaagatatgaagttgttcaatatctccttaaaacaaccactttcccctactcccgcttatgttttacgatcgtttaccccctattcactaattaaagtatcaaaaatccttatgtttactgtcttttttagctcattataaatttttacgataagcatgttattcgtgtacgatatacgacttgactgtaattggtgacgatttaacagagatatttaatgcacttctaacttttttaactgcaatgggaatcattgttgacccaacaactcaaggtatttctgatagtgaacaagcaatggattatgataaaccccctccccttctcttaattgaggagggtatttttttcgtaatgaaaaaattgcagaaaactttacatccttttacaattttttcaatgactatgttatgattgttttcgagagatttttgaaattttcagaaagaggggtttggatgagtaagatcgcttcagaagttgtcgctactacactgaatgactggtacattgctataaaaaagcaaaaggttgatgagtcaataaaatattattcagagataaagaaactttttgatgaaatggaagaagatcaagaagttcttgcgtattatagtttattagaagaaagacataaaatgttgctacattcctcacgaggagaacctttgcaaaagcacacctattttactgaagacaatcaaaacttcattaaaaaaacaaatgataaattagaatacaacttttatctatttgaagcaatgtatgaggcatacaacaaaaactatgatcgagcaattaacttatatggattagctgagaaaaagcttgcagaaattccagacgaaattgaagcagctgaattttactctaaagtctcttacttatacactcttgttaaacaaagcattgtggcacaacattatataaaaaatgcaatttcgatatataagcgacaccctgattacaaatgcaaacttgctacatcaacaatgattgcagctgcgaactatgctgatatgaaacgatttgaggaagcagaaaaatattacttagaagcaattgatattgcaaaagaaacaaaagatgaatttttgaaagctcaattatttcacaatcttagcatcgtttattctgattggaataaacctgataaatgcatcgaatctcttgaaaaagcaataggaaatgaatcttggttacattcaatttattatataaattctttattcatgataattaaagaactctttaaaattgacgaaaaaatgaaagccattaatttttacaataaagcacaggaaagactcatattaatggagaataaagtatacgaagccaaaattagcatcttatacaacctttattgtggtgaattaaaaaataatttcaataattgtattagtaatattgagtttttaaagcaacaaaatgaacttgaaagtgtagatgaattgtcctacatagctgcaaaaaggtttgaatcaataggtgcttttgaagaagcaacgagctttttcaatgcgaaaatttgggctgaacagaaaatgaatcaggtggagggaatcttatgaaaaaacttgtgctttgcgtatctattttagctgtgattttaagtggagtagctttaacgcaattgagtacagattcaccatctaacatccaggtagctgaaaggcctgtcggaggttaaaaaaggttgattaattaatttagccctactcatacacttgagtgggcttttattttatgatttatgtccaccagtcaacccagctctgtgaagcgctgtacctgcaaacgtaactgagatatttctcactgttttgcccgagtaaaacttattaaagaacatcaagcaacacttataaatatccatcgtgatatttgtgggaaaatcaattgttttggatcgatgaaatccaccaccaagctcatctttactgtaaccaattccaaggctgatcgttcgaccaactttattatgtgtacatgcccttcttgcgacttcctcacaaatttccaaaagaacagccttaatctcttctctccttgtataatccctcagtaaaatctgactcttatcaaaactaatctgaccttgcatcaactgagcacctatttctgataaatcaattccatgcgcatgatagtacaactggtttcccattattccgaacttcttttcaagcagctctaaaggaaatttagctaactggcctacagttgatatacccatccgattcaggtttctttccatcctccctcctattccccatattttagacagtgaaccttccagagtttatttggcacatcttcatatctccaacgtgcaataccactctttgttttcttactctccaggtcaagcgcaagcttactaagcaacatattgtcaccaattccaactgtgcacatcaaaccaaattctctccacatgctgctttggattgctttggccatttcttcaggattctcttttcctgcatctaaaaaagattaatcaattgaatacgtgtggacacatttttcaggaacaaatctgtaaaacagctttgtaatctcagttgaaactctgatgaaaagcttcatttgtggatttacaatgtatattcttggatcttcaggtatctcaaatagtctcgatcctgttttgattccaaaatcttttttaagtgcaggagatgcggctaatactacacttacctgtctctcgatatttcttacaacagccgatacagaagtataaaacacaaagtatattcttacgtagaaattgtgagtaatcaatcattgtatgtaactccttgttatatatactgtgttgttatgttgatctttaacgtgaagcttgtgttgttcaaaattaatgtaatgaactcttccggcggcattttcaaacaaatccatagttgtaaagtttgaatttcaaaatttaagtgcttcagaaacgagaacgtccatcatctcaatttttgatccatcaatcaaatcttgtttaagctgtattaaatgttctagcatcattgatgtccattgattgttcctcgatccctaaacatatcgactcactccttgattgatctaatatcaacagaactaatgttccttattcaatgcagataagaacaaacgttcgatgtaaatgttggtaataaaatataaaggtcaataatgatatccgtagtattaataaaggagagattcttttcgacgagggagagtgtgatggtgaatgaagaagaggttaattggatttttggtcttagttcctgctttgattatgtcgggtataactttaatcgaatcaaacaaaaagacccctgtagaagttttagaaagtgcttgggatgaatttgggttatttagttttgaaattggaataacagatccggcaattacaataggcatggatcaaaccaaaagtgaagcaaaacttcgtgaatatttaaaagataatctgtctagagaagccaaggaaaaatataagatttatatattcaaggacgatattgttaagcttgagaaagagcatcaagaatatttgcaagaaaataatctcaataagtaaaacgcccagcacttattgagctgggcactgtttcatatttaaattgaatttttataagcattaatagcttcgtttcgcaacaacatattatttttgttaaccatgcctatgttgtaagcttttttgataatatctaatacctgtgaatctaatgcagagagattacctcccggattaaatcttgatttccaataatctaaagacttatttaggtcaagtgagctttttttgttctcgggtttaactacttcatttttctcaagtttttcacagaattcactaaaactaattgatgaaagagtaggattatcccctccatacccttctgtagccaaactgcaaaatgctaagaatttcggatcataaataagatcgcttgagtttacattcatcacagataatcacaatcctctcagagctttttataattgtattaccttttccatttttacacatgttaaatatcgacaatccctcaaatcatttaataaggttatgtcaaattttaatgttgataaatacgcaaaaataaaaggaaaccatagttccaagtaccttttaggctttctaaaccaatttttacagcgtttagtccctttttgacaacagttgtgtttgaacctttttctgtcgtgcttttataagcatttgaaagtttactaaaagttgactctaaagatttaatggacaaatcttgaatttcttggctaacaatcttcatttacaattctcacttttcgttttaaaaacaacacctactcaatagttgaatttaggactacgccttgaattttgcgattcgcaaactatcatatcagctacagctttaaatgtttttcttagcttcaccatttgtgaccttagtcccttgtactctttggctcttttatccgcttcagagagcaatgaatcagcttcaaataccttcatttcattctcctttcaagcctactctatgtaaatttcaccacaattatttgcttgaataacagaaaaagacagccagaactgactgtcttatacatcgtgcgatcgtgttctataataattttctgcggtatagtagcaccattcccaaaaagttgccccattggattctatataccgatctagaaatatctcaaaatttaaatttaatggtgtatattcccctatttctaatataaaaagatagttgggatcccctttatccaatttatctttgtcgatcatcaaatggcacccttctaataagtgaccaattgggataccattgatgccttcaaacaaatcctcatattttaattcttcttcaatctcttcaaggctaaataaataaagtcctccacctatattctccccatcagaaagaatttcaaaaattttcgcaccgttatgtagtgtcatgaacttctgataatcctctggaagggtaatctgatgtttagcttcaaaactttgaatgtcgttaagggttgctttgtcctgtgaaaatgtaacaaggaactccatgatatctccttcagaacaaaacaattgaatggctcctttttcgtctaaaagacttttcaagccatttacagtcttatgaacaaagttagtcacatacatcacccctttatttccttttaacaataacctttcaaattccaaaagatgtgaacagatcgtgataggtgctcttttcagtgaatataatgcaataaattctaaaaagaggtgcctctaaaaattgaattctctaatgaatgatgacatggtaaagatcattagaaatggccttagcgcatcccagcatccaaagcatattcttgttgtaggagctggattgtccgggcttgtatcagcatcattgctgaaaaatgccggtcacagagtaacgattctcgaagcgagcggcagagcgggcggccgtgtctgcactttgagagctccctttagtgatgatttgtattttaacgctggcccgatgcgcataccgaataaccattcgttaaccttagaatatatcaaaaaattcaaattgccaacaaatgtatttctcaacagaaccccgatggacatcatttatgcaaatggaatcaaaacacgtctccaagtttttgaacgagctcctggaatattgagatacccagttgcaccaaatgaacaagggaaaacatctgaagagctgatgctttctttactgcagcctattctaaattttatcaatcaaaatccagcgagaaattggcggattgtcgaagaacaatacaaaaatcattcgttaagctcttttttaaacacgtatttttcatatggcgcgatcgatatgatcggtgtacttttggatatggaagcgtatatggggatgtcccttgttgaagtattgcgggaatctatctttttttcatcgcccgctcacttctatgagataactggcggcatggatctgctgcctcacgcgttgcttcctcaattaaaaacaaacattctataccatcaaaaaatgatgaaaatttctcaggggaaaaatcgtgttacgatccattgtcagcatcaacaaacggcagaattcacatcattcacagctgatctcgctattgtaaccattcctttttcaacattgcgatttgtaaaagtcgaaccataccattcattctcttactataaacgaagggcaatccgtgagctaaactatatcagtgcaacaaaaatcggcatagagtttaaaagccgattttgggaaaaagccgggcagcgcggcggcaaatctattactgatctaccgattcgtttttcgtattatccaagcagaaatattggagcaaatggacatgccgtcattctggcaagttatacttgggctgatgaggcactgatatgggacagtctttcagaaggagagcgaatccagtatactttactgaatttatctgaaatctatggtgatattgtgtggtctgaatttgtgtctggcacttcttttagctggagccagtacccgtattctgcggggggatttacagctttcgaaccaggacaagaattagagctgtatccctatattcctgtccctgagggcagagttcatttcgccggagaacacgcctcactcactcatgcgtggatgcaaggcgcgattgaatctggaatacgtgttgcttatgaggtcaatcgcttaccttagatcatgctcacatcttgttaaaactggttgatataaaaagaagtgaagaatttatactcctttgtttaaaagattaattcaaatatgggatgtctcaacattcagttctttattatttttatacacgttttgaatgcggacctcccttttcttccataatcattaataaatacccaaccatagaaaacgttttaattaaccatcgggcgaactttctttcactgtataacgattcttaatgttgcttttttatcctttacttgtcctctctttttttcattgacttacatttcttgaaaaccagtataaatcctaaaggaattttgtaacaaatacagaattggaaagataagcgccaaaagaaatgctaactccttatctcaaagacaaaactgcgcttatattaaaagaaagaggtgtctttagaatggttcattttaaaaactgccctgatccttctctaaacgccaattctcagtctcaccccgaattttcatccgaattagaacatattaagacaagaatgcaaaactttattaagcactcggttacagcccaaaatatcgaagttactgacgcaagggtgacggccgaaggagaggtcacctctcttttaaaagaacgtctcgacaaggaatattataggcttttatctaaaatcacccgggaagtaaatgtggctgacttcggcgctgttccagatggaagagacaatactgaagcttttcgaaaagcaatcgggaatggccgagtcaaagtacatgttccagcgggagaatacctcgttcaagggattaaacttccatcttggacaacaattgttggacaaggtaaagggatcacagtgattaaattgcatgaagacactccagcgcatgaatgggtgattacaaatgatgattatcaaaatggaaatcgcaatatttttgtccaaggaatgtcattagactggaatccaagtagacaatgcggtgtgagaaatccagggggacagttctccagttgtttaacttttgctaaggttgaatatgggtggatcaaagatgtggaagcgattaacgcaggtcttcatggtattgatattacatcgccaacgtatgaccatttgcctgataccgattggacaaaagacggatcaagatatatttggatcgataactgtgtgacatatggttcaggagacgacggcattaccacccattatagcgaatacatctttatttcaaactgccattcaggaaatccgcggggaacagaatttgctgaaggtgtttcaaactccaacggaatagaaattgacgacggctctaggcatgtgtggcttttgaataactttacaagcggcaacatccgcggagttgaagtaaaagcccatgaactgtggccagcctctcaaaacgtccatatcataggccatatttcttatcgcgatgttcgtgcatttgatcttcgtcatattggtcaccatcaaattacagatcctgaaagcacaacagcatacgatgtcacactcattgattgttcagcagttgaaccagttttcaactcgctttacgatgctgtgaccccaagagcgctggttatttcggcatataaaaacgttaatgtaagcggattcacagcgattggtgatccagactatgattataaagaaaaccctgtcgtagccttgcaatatcgcagccaaaatataaccattaatggtattaaaattcgcggttttaaaaaagccggtgttgatattaatttatcaggcggatcaaataaaactgattatattaaaatttcaaattttgatatttataaatctgctccaaaaggaatttcaatcggtggaggcctctacaatgtcaatattctaaatggaacgatgattactgacaatgggacagttgcaattcagtcccccaataatcaggccacaattctcggtgtacaatcagaaggttatagtgtggcagcctcaatcaaaggccaaacataccaacaagttccaatcaatttgaaaggaggcatacagcttgcaacgacctctggctttgccgttaaccaaacaagcgcagttatagcaggtaccggcgacattacggcccgcggagaaagaaatgcggtcattagctcttctggaggctccagtactgaaggctctcgcgcattaatcgcttcttcaaataacgcacatattagaggaaaccaagcgtcaagaacaatactgtcttctgaaaatattatacttgaggaaccatacaccgtggcaggaggtcatcaatcaataaagtggcttcttgactctgttcggggaaacgggacgtttgccggtgcaatcagttcttctttaggtggatatggagagtattttgagagttcaactggacagttaatccatactggtacaatcgtgactttaagaggtgaaaaaattgtgcccgcgaatgttggagattatatgcttggcgttatttcagaaacttcagctttcatttcaggagcctccagtttcgtctggcagggccgttatttgacaaatgagttcggcggatttatttatgaaacggtgactgatgaggaaagcggtgaactcatacgtgttcccaaacaaaatccagactacgatacagcgctggaggcaaattatcattcacgggcagcaagagacgaatggcacgttgtagggttggttggccaacattatgtgcgtattgacgaaactgtcaatcaaggagattatcttacggcacataatggaataggaacaaaagccactgaaggaagctggaaagtaatgaaaataacctctgcttacacatcagaaaaagggtatggtatcgctctaaccgtcatcaaatagtggatacgccgaccagttcaatatatgtttatccaaataattagatctcttttctaggttctttattccttgtatgttattatcaattttcaatatctaccaaaacacccctaatatactatcgtaattaacttatattataatcaaaaaaattttgacagctgttccttctcgttattcatgaaagttgctattgaaatgagtaaatggatatcatattagacttctatagcaaatacaccatatatatcctttaagtatttacaaattgaaaatgtttcatgaggcttattaaaagtattgttcttttatcatctgtaagtcgatacaaattgcattaagatcacacctaaatcacactgagttttttcttacaaaaaaatgaaaaccctttccattctaaattcatttcaccgttactaaaagtaatccttgcattccttcgcccttcatgctatattcatatagcgatgagctgaattgtgtaagtcgatgtacatgcctttacggcacacacgaatgtggcgtgtggtgcatcgcctcaatacgcaaagacgtttgccttaggcaaacgtcttttttgtgttatccgatttttgtgccgtttgaaacaggctgatccggctgcaaaaggacgacatcgccctggccgggtatgccgccgaggaccaagacttccgatttaaatccggcgatccggcggggcggaaagttcacgactgctatgacttgcttgttgacgagaccttccggctggtaacgcttcgtgatctgcgcgctcgattgttttatgccgatttctgtcccaaaatctattacaagcttgattgccggtactcttgcttcaggaaattcttccgcttttacaattgttcccgttctgatatccaatttctcaaagtcttcaataactgccatatcaataactcctttttctcctattgtaaaggagatatacaatattcttttaactaaagagccatcattttttatccgaatataaggtgtttcgatacaggcggggcggcattcctgtgcttttcgtgaaccatcttgtaaaagaagaaaggttttgaaagcccagcgcctcgctcacgacggtaaggttttcatttctctccatcagcattcgttttgcttcctcaaggcgaaggtcggcaatatagttctgcggggacttccctgtctgttttttgaaccagcttgaatagtaagctgggtgataatgctcgatttctgccagcttcttaatcgtcagccgctcaaataaatggctgtgaatgtatgcaattgaggcatagctatgggattgaagcttttcttttatgtattgtactagcatatgaagcgagttggctgttccggcctttgcttcctctgtcagcaagtacctgatcgaagaccagaaaggatcgagtgcagcttcaattcccgatcctgcacgatactcatcaattttcattgcgtgaagcggaacatccagtacaagacattcatttcttccgatagaacggaagcgatgctcgcactgcggcggaatatataaaaaatgatccggatttaatttcacctggcgcccctcagtctcaagatctatactcccttcaagcggaaaaagaaattggctgtacgcatgcttatgtgaatgataaaggcgtgtgtatgtccgtttttcgcaaatcatctcttgaagcgaatccatcagcaacccccttcctttggtcatcttttaatccggtaatggtgttccgatataggcgaaaatccgattttttcatataaagaaactgccgccagattttctttcatcacttgtaaaaacatgcgttccgctccgttgttttttgcccattcagtcaacatcctgatcacttgggttcctgccccttttcctctgtgctcctcagctacaacgatattactaagtccgccataaccatcaatgacagaaaccgtgccaagcgctgtcaggctttctttgtcatacatcttgaaaaaagttttacacggcggcatgcgttcgaatatgtgtttgtaacctttgtgacgttcgggtgaaaacccttctaattgaataaattcatctatccaaacagatgatggctcttgttcccacttgtatgtaaatcggctgttgtcatttgttcggctcataattgaccggcacaacgctgtcatctggaagcactcgtctaccttttcataacggctgtctgccaatgcgtcatcaagccctttcggtgatgcgttgctaatatgaaaacaaacaggtaagcctaaactttgataaaaaagttcggcctctagctgaaaatccccttcaggcatatccgcagacgtccatacgctatttgcccttttggttacgccaaaattcgctctgagaagccatttccctatgcttttttgaaaataagccggccatgaagctgccgctaatcgttcaatcttgcgaatgtcatccattgcataatgcctctcccctatgtatactcccttgatattatacaatattcagaaatataagacatccatttatttgtttacataatatttttattgtttattaataatcctgacaaaaatgtccgaattgaaaatgacaggctttctaaaatgtcctcctcacgttcaaatgcttcttttgcgattaaaacagtaaagccatgcagcagacttctgagcccccttgtcgcatgaatggcagtcttttcacttgcatagccgttttcaatgagcagcttcgtcacaagacagacaatttggtcagagacgatttccgtccgtttgtcgtgaaccttaagaagagccgcttcataatatccgggattttcaattgcaaaatcaacatatgcatgagctaaagaaagcatcgcggaatctccctttcgttcggttacggagtccgccatttgatcaaaaagctttgtcagtcctctgacagcaagttctgctctgatcgcttgcagcccgttgatatggttatacaatgacggggggcgaacattcatttttttagaaagtgcggcaagtgagacaccatttaccccttcctgatcggcaatctctgctgcagcgtctacaatcattttttgggtcaaacctattctcggtgacatgctcatcatcctttctttgctttttggatcgcctgtctcatccgctctgaaggtgatcgcaggaattttccatgtccgacagcgagacaggaaggcgccttatctgcgagcaattgtgcacttttgatggcctcctccttattccatgtggcgaaagcgggaaaaggaaacgtccattttatctggcctgatacagcgattcctccgtgcaactgaaacgcatctcctgctattaaagtgccgtttcttgtatcaagaaatgacatgctgcccggtgtatggcccggtgttggaatggcaagcagagaaccaattgtttcaccgcccgtcagcagttggtgaggctttgtttgtatgtgtttcggaatacctccttttataggcgtctgcggctcatcttgccgcaaggatgtgtcaccttggagcaagaatgaatcccgttccgagatcatgacctttgcatgcggaaatgtttgtgccaatgtatccagtgatccgacatggtccccatgtgcatgagtcagtaaaatatgctgaagcggttttccaagctgattcacagcttgaataatccctttatagctgcctggcagtgcggcatcaataagggtgacttcgttttcttcctctactaaatagcaattaaccggaaacaatgctggaaaaaaagtcagctgccaaaccgtttggtactgagtcattctcatctttttattcctcctaacaaaactaatggcgttagttttattattaactaacaccattagtttttcaagagtttattatttttttatcgctacataaatgttaacttgtgctcgctgtggcactgcggcactttgatcatacatctcaaaatcacctgtaaacgtgcgcagatgccgcttatcccaagtccaaatttccttccacgtttcaagcacaatctcttcaataggaccgattctggaagtgaaaacggcgtaagcggaagccggcaaatcaatgttttcatatggtcccggaagaatgtcgtcgtattcctgaaacgttccgactgaaaacgtataaaacccattcgtctcttgttcataattcgaatataaggcaataatgcttttgtctttttcagcctgtgataaaagagcgctcatatcctgcttccagaattggtcccacagtgccggaatcctcctttcttccgtcatttccagtgcgttgcttgtccgttgtgacagtccggcaaatcgtttccggtctaagtgtgttatatgtgaaaagcccatacgatctcctcctttttttaagattatagacaaagaaacctgacagcagtgtgtcaggtttcatatattttttgcatgtgatgaatggtttcttttactttatcccgtatatgaagaggctgcagaacctcaatatcctttccgaactggagcaaaaaaccgatcagccatggatcttctggaagtgaaatcactgcccggcagatttcatcttcctcacaacagtgaaggacatcatatccgaaccattcacctatgcgctgacgtgctgacggctgaacaagaataaccaattcagttaaacggtccttttggtaccaactcttatcccatggcaaagtgtccagctgaatgtcttttctgataaatgtctgatgtaagatagccagatctttcatccggttcagtttaaaaaagcgaaaatcatttcttaccaggcagtaggcatataaataccagtgccccgccttgcaaaccaatgtataaggttcagtttcccgaagtagtgtttccccgcttgcgcttgtatatgtaaaagatatcgttgacaaccgatcgatggcagcgctgattttctcgcgcagcgtcttttgatcctcagtatggccccaagccgtcatgtcaataaaccatttttctgtttggtgcttaaatgcttgagtagattgttcaggtataaggtgtttgattttttgataggctgtgctgtgagaaacgggttcatacatagatgaaacgctttgcaaagcagaagcaattgcaaacaattcctcctccttcagccactctctttcaagccgatacgtttccatgatgccaattccgcccccggaaccctgtgaggtcacaatcggaataccagccctattgatcgtctcaatatcacggtaaattgttctgacagatacttcaaacagctcagcaagctctgcagcctgcacttgttttttgctgatcaataacacaaccatcgctaacaaacgttccagtttcattctgcgcaccttttcttcttgtattttccaacaaaacaatcataacattttgataaagcttgggcatatctattatgcggcggaatacacctcgcatatgctatgaaaaaaggggtttccccttcttttttgtgttcagtatttatttcagctactatttccgaccggataagcatacacttctcaacggaggggatttcacatcatgcatcttacacttcagagcgtttatcctgccatgatcatcatcttttttctgtataaaaaaattaaaaggtccatcggataccagccgctgaagccccgctggctgttcacccgtatcattcttttctcgctgtttgcttttggactttcaatcttcagcgccattcacccttttttatatggatatctcattttgggcattcttggcggatggctccttgtctttttcgctaagaaaaacatctcttttgaaaaacgcagaggaaagatctattttcggactcatatttgggtagaaatgattctcctaaccttattcctgtcaagatttctatatcgagtgacagagctttatcttacctcgcctgatctaaacagccttggatcttacggtcagtcaatcggaacggaccctctgacaataggcgtcttttttctgatagccgtttattatatcggtttttcttcttttgtcatcaagctcagcagaaacgaactcgaacagcacggacacaataaagaaaaagacatccttgcccgctagcagcgagttaagcaaggatgtctttttcaatcatgctgcgtatgatggatcatttgctgaagaacatctaaaacatgttcatcctccggagagtaataaatcgatgttccttctctgcgcgatttgacaagccgaagatttttcaaaaatctaagctggtgggacacagtggattgcagtaaattcagcttttctgcaattccgtttactgcatgctcaccctgggacaataaatggagaattctgattcgggtaggatcagaaagcgctttgaatgtttgcgcgactagaaacagcgtctcctcgtccagatcagcagccgattgttccgtttctctaaattcagtcatatgtatcacctttctttattcatagttttatcttataacaaatgcgcttgagtgcaaaccagcctgcttgtattccatttcaatctcatagtttaaatttatgtttcaaatcaggtttttacttggtctgatataccgtcttatgtcataataaaaaaggtcatactgctccaaacattgagggtgaaacacagtgaagaaaaagagaaaaggctgtttcgctgctgcgggttttatgatgatttttgtctttgtcatcgcctcttttttattggtcctgctttttttcaaccgggatttaatcaaaaaacttccgatcgatacgaaaacgattgttttggaacgtttaaccgattacaaacccttggtggaagaagagcttgaaagccaaggactctctaattatacatcactcatattaggcatgatgtatcaggagtcaaaaggaaaaggcaatgatcccatgcagtcctctgaatctctggggttaaaacgcaatgagataacagaccctcaactcagtgttaaacaaggcatcaagcaatttaccctcatgtacaagaccggtaaggaaaaaggcgtggatttggataccattattcaaagctacaacatgggggcaggttacattgattttgtagctgaacatggaggaacgcatactgaggaattggcaaaacaatactccgagcagcaagtcaaaaaaaatcctgacctgtatacttgcgggggaaatgcgaaaaatttccgctatccgtattgctacggtgattatacgtatgcagaaaaagtaaaagaaaaaacaaaaactgttgaagaatctttgcaggttgcaacacttgaaaccatggaatccaaggctcatgaataagagtctatcaatttactgacaaaagcccaaaaatgaatttgggcttttgccatgtttacacgtaaaaaaagccatactgagtatggcttttaataatacggtgaaatcatcaaatatacaataacgcctgtaaggcttacatacagccatagaggcattgtccatctcgcaatttttttatggcgctccacctgcatgctgaagcctctgatcagcgtaaacagcgcaagcggcacaataattgcagaaaggcagatatgtgtaattaaaataaagaaataaatcgggcgcataataccttctccgccatagagcgtgttttccgcaatcgagtggtacgtcacatagcaaatcaaaaatagtaatgttgttgtgaacgcagccaaaataaagcgtttgtgagctttgatatttttctgtttaatcataatcagcgcggccaataagaagataaacgtaaagctattgaatatcgcattcagcattggcaaaatgtgaatattcgcatggctgaactgatctaatttaggcataaaaaacagcactgcgattaaaccgttaatcagaactgtcagcgtaaggacaatccccgtgtaatttttcggtttattttctgtttggttcatttggtgacctctcctaatttgtactggctatccaaatcgtatgcaaattcaaagaagatgtcaacggtttcgattgcttcgtcagaaattagacacacttcaaaggccggaggctattagccccggcctgttaggtttacgcctcttttatcaaatgttcaatgaccttatgttcattttcattcagcaggttcttttgaattttcgaatgaatgggtttattcatatgctgatccaagatatcggccgtttctttatccccggcaataaccattcgttcccatcttttcgcggcagctttttgatcaaggctggcagccagccgcttatacagtctcgattggttctctgttacatgttccctcatccggttctcttcaaatggtggcgctttgtctacagcggaatggctattcttccaagactcattgatcatatcatactcataacgctccaccgcctcaatttttcctaaaacggtttcaataattttcacttcatgctgctgagttaaaataaacgccgtacttgggtatgcctggcgcaaacccttcagctgatccaggacagctgtttcttcccagtaaaatcttgtatctacagggacttgaagcttaataggctcccatatgccgctgtcggaaacaaaaaacacgagactgcggggcatgtcttttcccattgcattcaagtattgattcattttagccctgattccatccagacacttttcctcctctggatcactagctgccaaatactcttttaatcggctgaatcctgactttagggcaatcttccattctcccccctgctgctctggatctctcatgtctgtattgagatacagagagagaattttatccggcggttccaattggacatactgtaatttgttaatcaatgaatcaatcgccattccgattcctcctttttcacaggttagttttctttttcctctcttaaaaacgatcaaacctgactttccgctaatttctagtaataatggaattgttgtttacaatacgcctctcttctaatacaattggtaactgtgtttctaagctgatttttgaaaggagtttgatcttgtttactattaaagaaaaaaatcgtcaagagcttgaagaagaattaaatgatttagaatttcaaatttatcgcatgcaggagaatatgaaggatttatctaaagatgccaaagtgcttggtattgatcaatcgaaacatgatgagtggatgattgtttcctcgattgatgatggccaaacatgcaaaattatgctaactgattgtaaaacggcttaccgaggaaaaggctgtttttcacttgtagcgtcttacaaggacgatgccattcatataggcgatataaaaggccctccgaatcacgggtttggttccatttgcatgaaatatttaaaagatatagcaagagaccacaatataccgaaagtcacaggagacatcgccaaacgggattggaatcatgtagaccggctgattcacttttatgaaaaacatcaattcaaagtatgtatcgatcatgatacccaatccggcagcattaagtgggttgatttgtaaaaaagtctggaagaaagagccaagatatgctgtaatggtaaaaaaccattgatggagggttctatgtacgcctcaaaactgaaaaagggagacgaaatccggatcgtgtctcccgcgaccagcatgtctatattatcaaatgaagcaaaaatccgagcacttaggttatcgggtaaccatcgctgaacacgcaaatgaatgtaatgaatttgattcatcctctatcgagtcaagagtccatgatctgcacgctgccttttttgatccaggcgtcaaagcgattttaacgacactcggagggtttaattcaaatcagctgctgcgttatcttgattacgagaaaatcaaacggcatccaaaaattctgtgcggctattccgatataaccgctctttgcaacgcaatttatcgaaaaacgggtcttgttacgtattcaggcccccacttctcaacatttgcaatgaaaaaagggcttgattatacacaagagtattttctttcttgctgcgcttcggacgacccgtttgaaattcttccttcaagtgagtggagcgatgaccgctggtttttggatcaagaaaacaggcgtttttatcctaataacggccctgttgtaatccaagaaggttatgcggaaggtactttaattggcggaaacttatgcacgcttaatttgctgcagggaacggagtattttcccgaaacagaacatactattttattgattgaagatgattatatgtcagacatccatatgtttgaccgcgatctgcaatcactcatccacctccccgctttttcacatgtaaaggcgattttgatcggcagatttcagaaagcatcaaacgtatcaatggatcttgtaaaagccatgatcgaaacaaaaaaagaattatccggcatcccgatcatcgcaaatataaatgccggacatacctcgccaattgccacgttccctataggaggaacatgcaggattgaagctatttcgggtacatcacgaatatggattgataaacattaatcagcttgtaaatttttttacaagcttttttagcgcaatcggttatgcatgccgcacgagacatgacaaatgtcatataggaggcatgatgtgtgctactacaaaagacttctctcattagcgtatactgaaccgagacacacaatgagaggatacttactatgactgaacaaaccattgcacataaacaaaaacagctgacaaagcaagtcgctgcatttgctcagcctgaaacaaaaaacagcctgattcagcttttaaacacgtttatcccattcttcggcctatggtttcttgcttatctcagcctcgatgtctcctatcttcttacgttagcattaacggtgattgccgcaggttttctgacaagaatttttatcatcttccatgactgctgccatcaatcttttttcaaacaaaaacgctataaccacattctcggttttctgacaggtgtcctgactttattcccgtatcttcaatggcagcacagccattcgattcatcatgcaactagcagcaatctggataaacgcggaacaggagacatctggatgttaacagtaaacgaatataaagctgcatccagacgaacaaagcttgcatacagactttatagaaacccgtttatcatgtttattctcggaccgatttatgtttttctgatcacgaaccgttttaacaaaaaaggcgcaagacgaaaagaacgtgtaaacacataccttacgaatctggcaattgtcgcgttggctgccgcttgctgtctgatctttggctggcaatcgtttttactggtgcaaggcccgatatttctgatttcaggttcaatcggtgtttggctgttttatgtgcagcatacctttgaagattcttattttgaagcggatgaaaactggagctacgttcaggctgctgttgaaggcagctcattttataaactcccgaaactgcttcaatggctaacaggcaatatcggttaccaccacgttcatcatttgagtccaaaggtgcctaactataagcttgaagttgctcatgaacatcacgaaccattaaaaaacgtaccgacaatcaccttaaaaacaagcctgcaatcactcgcgttccgtctatgggatgaagataacaaacagtttgtgtcatttcgggctataaaacatatacctgtaagccttccgcctgattcaccagaaaaacagaaactgcggaagaatgcctgatgataaaggaggtcttctaatatactagaaggcttcctttttattgttggagggtgcattctggctttcacaatgataaagttacaagtaagatgaaaagctgaaaatgaggtaagatcatgattaaaaatcattttacatttcaaaaactaaacgggattacgccctatatatggacgatatttttcatcctccccttctactttatatggaaatcatcatctacatttgttattattgtcggcatcattttgacgcttttatttttttcggtatatcgatttgcttttgtctcaaaaggctggaccatttatttgtggggatttttattaattggcatttcaaccgcctccattaccctgttcagttatatttattttgctttttttatcgcgtattttattggaaacattaaggaacgcgtcccttttcatattttatattatgtccatttaataagcgcagccgtcgcagccaatttcagtctcgtattaaaaaaggaattctttctgacacaaattccttttgtcgtcattaccctcatcagcgcaattttattgccctttagtataagaagccgcaaggagcgcgaacggcttgaagaaaagctcgaggatgcaaatgaacggattgcagaactggtaaaattagaagagcgtcagcgaattgcccgcgatctccatgatacgcttgggcaaaagctttctcttatcgggttaaaaagcgacttagcaagaaaattgatttacaaagatcccgaacaagcagctcgtgaactgaaaagtgttcagcaaacagcgcgaacttctttaaatgaagtaagaaaaatcgtttcctctatgaagggcatccggctcaaggatgaactgatcaacatcaaacaaattctcgaagcagctgacattatgtttatctatgaagaagagaaatggcctgaaaatatctcattgctgaatgaaaacattttgagcatgtgcttaaaggaagctgtcacaaatgtcgtcaaacacagccaggctaaaacttgccgagtagacattcagcagctctggaaggaagttgtgattacagtgtctgacgatggaacattcaaaggagaagaaaattccttttcaaaaggacatggcttactcgggatgagagaacggcttgagtttgcaaacggaagccttcacatcgataccgaaaacggaaccaagcttaccatggcaattcctaataattcaaaataaacataaaggatggcttatatgattagtatatttattgcagaagatcagcaaatgctgctgggcgctttaggatcacttttaaacctagaagacgatatggaagtcgtaggcaaaggtacaaccggccaagatgctgttgattttgtcaaaaaacgccagcctgatgtatgtattatggacattgaaatgcccggaaaaacagggcttgaagctgctgaggagctaaaagatacaggctgcaaaattatcatcttaaccaccttcgccagacccggttactttcagagagctattaaagctggcgttaaaggctatttgttaaaagacagtcctagtgaagagctggccaacgccatccgtagcgtcatgaatggaaaacgcatctatgcacctgagctgatggaggacttatacagcgaagctaaccctcttacagatagagaaaaagaagtgcttgaacttgtggctgacggtaaaaacacaaaagaaatcgctcaggaactcagcatcaaaagcgggacggtgcggaattatatctcaatgattctagaaaagcttgaagtgaaaaatcgaattgaagccattacccggtcaaaggaaaaaggctggtttaaataaaaaaggatcttggcatctgccaggatcctttttgttaacctgaaattccagtttgagaacctcgccgcaaccagaattaaattgatcgatatcctcgctcctatacccgctgaacgattgcttgattaacagcccaataaaagactggattgaatgatatccctgttaaaatggtcggccattgcacatcagcagaatttctgatattgattattttgtattttcagtatgacaaagttgtgccacttcgctcccgaagctgccatgcccaactgcaagagcttaatatcacaataaaaaaccgtctgaaatcaatccgattccgttccgtaaatggcatctgctacatccaactgcttattatctgccaaaaaagatacaacaccagctcgtttcgctgatcaaagatagtaacaaccagctataaatgtcatgatgccgaatgtctctgtaatgtggaaccaatcttttaacccgagagcccctgaatcgcacataaagagaaaaacgggaccactttcttttatcagcatatgatataaacagctctaagcagaacaaaaaaagacacaagccaaaagctcatgtcttttatcacaatctatattattagtttaagactttaacacttacagttttgacgccccaattagaagcatcacttttacttggtacaaatacgtcgattttatttcctttaatagcgccgccagtgtctgctgctgttgcttccccgtagccttcaacatagactttagaacctagcggaattacattaggatcaaccgcaataactttcgcattcgggttcttatttaagtcaatgcctgtagctgtaacgccggaaatgccgccgtcgttagcagtgtaagcagtagcagtaactgttagttcttttgaagcttcttgattatttgtatttgattgaacagccttctcctctgtgttaacagaagtttctgcctcagcctttgtttcttgtttaggttgctgttgtacagcttcttgtttaggttgctctttttgcacagcctcttgttttggtgcagcttgaggtgcgtttgtttgcgcattctcagtagctgtgtttgctgctgttgcctgaccttttactgaaagagttgatccagcatagatcatgtcagagcttaagttattccaaactttcaggttgttgactgtcgtgccgaatttttgagcaatcttagaaagcgtatctcccgctttaattgtatattgcccagtcgtggttgtttcttctgaagaaatggtcagtttttctcctgcaatgattttatcagaagttaacttgttccattcttttaagtcctttaggttcactccatttttctgagagattccccagagcgtatcacccttttgcaccgtaatttcttttgcagaagcgtgagctccgaatgcagttgttgaaagtgcagcaactgccacaaaggacataatcgtcttcttcataagtaaatcctcccttgttagctttttattggcggctaacaggtgatatcgtaacacacgtaaatgtcaaatcaataacaaaaagatatgatttagattacagttcctttacatgaaggatttctctctgatggaaagacttgctgaacccttgatataataggcttcgcaggtctttttattttgaggcgaaacagagaaaataaaatgtgttttttatagaaaaaaagattgtttttctgtttttttagtctgtcatccttgcataagcttgtatttcttgtaaaaaaagccggccgtattttgctcttttttgttctccgactccttttatagacaaaagttcatcatcatttacgggctgttttcctgacatttcttttaacgtttggtcagagaaaacaacaaatggcggaacaccctgctcagccgcaatttctttccgaaccatgcgcaatcgttcaaacagctcgtcattttcagtaatcgaggccgcttttagcgcttcttttctcgttactgataattctcctctcagcacattccttcctttactgctgacaaaaagagtcggaaacgttccgtctgacatcctgatgaaatcgtcagaaataagaaattcgataaaatcactgatttcccctacggattgatgttttaatatcccatatgttgagagatcggcaaagccgttttcaagaacttttttatttttagatccggcgagcacttgggcaaccatcatcttaccaaagcgttccttcatgcgaatcatacacgataagaccatttgcgcctcccgtgtcacgtcatgagccatccttgtatcagtgcagtttccgcactgtccgcacgcatcaggctccttttctccgaagtacataaggataaaacgctgcagacagtcttccgtgtgacaatagtcgaccatttgcctcagcttttttaaatcctgcttttgtttctcttcatgttctgattgttcaattaaaaaacgctgcactataatatcctgcggtgaaaacaggagaacgcactcgctgtcaagaccgtcccgtccagcccgtccggcctcttgatagtagctttccatatctttcggaatttgtgcatgcagaacaaatctgatatttgatttatcaatgcccattccgaaagcagaggttgccaccatcacttgcagctcatcattaagaaacctttcctgctgctcttttctcacatcatcagccaagcctccgtgataccgccctgcattgacccgatttctttttaatcgctcataaatccggtcagcttcttttctggtcgctgtatagataatgccagcttcatgtttgttgttttgaacatactcgtcaataaaacgatccttattttctccctttgctactttaaaggttaaattgtctcgggaaaatccggtatatacggtgttttctttttgtatgtgcagctgtttgcagatatcctcgtgtacctcaggggttgctgttgctgttaatgccatgatgacaggattgtcatgtaattcacggaataaaatttcaatatttctgtagcttggcctgaaatcatggccccattgagaaatacagtgcgcctcgtctattgcaaccaaagggacatcaatgccctgcaaaatccgaataaactccggtgacgttaatcgctccggtgtaatgtaaaatagcttataggccccttctttaagcccagtcagcctttcatatatttcctgactcgattgtgtgctgttaatgtacgcggccttaatccccgcttcttctaacgcatcgacttgatccttcatcaaggaaatcaacggcgaaataacgatcgtagtcccttcaaacatgagtgccggaatttgatagcaaattgatttgcctcctcccgtcggcataatgcagacggtatttcgtctttcttccgtcaccgagcggatcgcttcttcttggccattgcggagcttttcataaccgaaataatgggccagaagggattgggctctatgtaacataacgtataaacctcgcttttccttgaatttcttccatcatatcataaaaaaacggtcttcatttcttccacacagaaattgaatttttgctataccaaacctttttaaataaaataaaaagccatttcccaaaaggaaatggctttcgctacgtcttgccgtatgcaagtaagaaagttttaaaccaccactcctcaaagtgggtgtttgcagaaacgttcctgtcgtcctctgcaatggaggcatgacattccggcttcgatataaaactccctattacagcttaaaggttaaaacttaattaacaatacgcacaaagtagcttcttttatatagtacaccatcagcagctttttatcaagagaccagaacaattgtttagaaaaactttttccagccgataaaaacgatttttcgctattatatccggagattcgacaagtcaaaaatatattacaataaaaaaacagccttttttcgcaaagaggattcatcactttcttctattataatatgtatacaaaaaaactcctatcgcccaatgataggagtctttgtttcattagaattttgcagcaagatcttttgcttcttgtaaacctttttcaatgatttcttgcgcttgatcaggtgctgcgttatgtccttcgatgacaactgtgtgcaagtcttgaacaccccagaaaccaagaactgttttcatgaagtttaatgacatttcaagtgcagccattggtccttctgagtagacaccgccgcgagcgttaagaagcgcaacttttttgcctcccattaaaccgactggtccttcttgtgtgtatttgaatgtaacgcctgcgcgagacagataatcaacataagtatgaagcactgctggcactgtgaagttccaaagcgggaatgcgaaaacaactttgtcagcttttacaaactggttcagatatttgtcagcaattgctgcttgttttttctcatcttctgtcatttccattccttgacctgctttaaatgttccgttaatcatatctctgccaaggtaaggaaggttttccttatgaagatctaattcaaccacttcatcattagggttgttttctttataagcagctaagaaagcttcgtaaagtttagttgaaacgccttcttcagctgtacggtcgcttgattttacaaataaaactgtagacatttgtattcctcccggtaaactttttatatttacttacaaatagtatgttactttcttttttacgtaaagtcaatcactttattttgaatatgagattttttttcaaaaaaaagcaagtacatctaatatcggtgtacttgcttgccatttttacttcgaatcttgttcacgatccaagatttcatacgtctgcgagcttttttgatcaattgtttctttgttggataagtcttttacctgttcatgaaactctctttcataagaaggagcatctgtctccagatcatcctccacattagcttgagcctcaactgtcattcttgcatagggaacagcttcaagtctttcgtaaggaatgtcttggccggttttttcacacacaccgtaagttccgtctttcatcttttgtaatgcacggttgacctcctctaacagctcccggtcaatctctttcactgtttggtctgtcatccggtctgtgacgagcgtcccgtggtctgccatatggttgtcaaccccgttggaaagctcccccacttcttccgtcattgattctgtttcctttttctcgccagacaattctttttgcatatcgagcaatttatgatagagatgctgtgtttgttcttttgtcagtgccatgtatatcctctcctttctatcctgtttcccgttttgccttctgtcaaacatggaaacatcgatggaaagaagctactgcctttttgaacggatcgtgaccgctggcgtcgatggtgcttcgggttttcgttggcactttttgtccttctcttctggcggtatataataggttgcgcctatatttaatctgccgctcagttcatcaatggtcagctcgccgaattcaagatgatagtcaattttttcgacattcagcgtttcaatatgtatataggtttcttcagactcctgtttgctgctttgtttttgtttctcaatcactgagagtctttcttcacattcacgcagtttgtcaagttctggtttcaagcaaagcctgatcagcgaccggaacatttttttcatgacatcacgaccctttgcatactcctctttcgtctacatatataatgaggtatataccatagaaaggagaggttttcatgcttccgactaacatcaatatttctcatctcaagactaactcgataggcaccggctcatcccttacctttggttctgcggagttaaggaacaggtgctctgctatcaaaagaaataacggttttggggaacaaaatgcagatgttattgttatggtcattccgattgaatcaattgatgaccgtgatggagcagatgcactcagtatgaaaatcaatcatcaataacaatggttttcgcttgaccttcgtctttttgaatagtgatgtataggattccgtctttaaaaatggcattcatctttccatgaagatgatcggaaagctgaattttcttctcaaaacttccgtatttcccttctttttggcgaaagtcctgttcattaaaataggaaaagcgctgccccttcaccactaaataatctccgtacgataatatgtgaacgtcttgtttacggtagcctggaagataaattaaaaactgcacttccgcaacggtatctacaatatccatgctcggaaatgaagcatctcctttccctcgctgatcttgctgcgcaaacggaaacggagattggccatttgtcataaaaggggttttttggtcttcatcaaatacctgtttccaaaagtcaccgccgtacatctgctgtgcgaattccatccactgcttcatcttttcgaaatccatttgaagccccctgtcttaacatactttataaccgccagcatacaactatagaaaggaggtttgcctgtggttcaaccaactccgtatatcaatattaatattttcatgctgaaaattaattcctttgaaaatgcttcagcggttaacgtaggacaaaatttattggcagaatggcaaaattcagataaaaaaaatcaaggctacggacagaattttggagatgcgagcggatttatgggcacgagaagccatgtggatgacagagaccaaattgattctccggcctcttttgaaagtgaagcggttaactcctcaatcaaaaggaagtgatgagatgttcttttcaccctccgtcgtgaatgtcggcggatttaaaatcaatacgatggatcgaggttcctctttaacactcggtccgtatcagcaggtcgattactttttatcagctaaaataaatcaagggtttggagaagaaaatggcgactttactcctcttgtcgtaccgatttcaaatgtattagatgcagatcttgttgattcgaactcagcgaaaaacagtgtggtgtaataagaacagggcgcacatgccctgttttttttataaaaaaaagcctaaccattttttgaacggctggctcatcaaatattcagctgcacaaatgctttgtcagcaccgcctgaacctcgcttaaatcggtgtctttcgcaaattctaattcgaacgttttgcttcttgtcatcaataaaagcccagtgtccggatcaaacattcccgcttcttgaatggcaaagctttcaattgttttatatggaagaaatacacgaaccttctttttggaaaacattttattgtcaaagaaaatgatccgcttatttgtaaagcaaatttggtccactcggagcttataaatcgattctattctttccccttcaacgagcaaagcctcaagcttctttgcgtccgttgatctgctaacagaaaaaatacccaatgaagaacccctctttctgcatttatctatttgttttatcattcactacataaaaataagtcctttatccctatataagaatacgacatagaagacatttaaaccattacgaacagattacatttttcaaatttttgatttgttttttggcttttaagctgttgtcatcaagtaatacgcacatatagagaaaaaagtttcaatattcagcaatgtttttataaaaaagcggtttttaatgatttttttaattttgttttatatttcctgttttaaccacaaaaaaaccgcagctgagctgcggttttatgtatcgactgcttttaacaaaatctgtttgatgcttcaaggaagcattacatctcttcgaagtattctttataatagccgccgactttattcgtattgtcgaccacaaagagaaactcctctgtttcattttttacttcatattcttttcccggcgttaaaacgcggtttacgatatatttttttgcgtttgtctgcacacactttacttttttaattgtttctttttcaagccaatttttatgaatcatgatgaaatctccttttcttatctataagcttattgtagcttttttcttttgtaaattgcaatatcggttattcattgattttgccttgatttctattatagaatgtttgtatacgcttacgtttgaagcaactatcacagcttatttctgctattcaatccaggaatcaatgtgctatcaccaagaatctcagaacagaccataaaaaatgactggaggtttgttacggatgagttctttaacgatgcaagtgacgaaaaggctggagacatttttacagggaacaaagaagctttatattgacggaaagtttgttccgagtgcctcaggggcaacctttgacactccaaacccggcgaccggcgaaaccttgatgacgctgtatgaagcccaggctgcggatgtggacaaagcggttaaagctgcccggaaagcctttgaccaaggtgaatggagaacaatgtctccagcttcgagaagcagactgatgtataagctggcagacttaatggaagagcataaaactgagcttgctcagcttgaaacacttgataatgggaaaccgatcaatgagacgactaatggagatattccgctggctattgagcatatgcgctattacgccggctggtgtacaaaaataacaggacagacgattccggtttccggcgcttattttaattatacgcgtcatgagcctgtcggtgtcgtcggccagatcattccatggaatttcccgctcctgatggcgatgtggaaaatgggcgcggcacttgcaacaggctgtacaatcgtcctcaaaccggctgaacaaacaccgctttcagctctttatttggcagaattaattgaccaagccggtttccctgccggtgtaatcaacatcatcccaggattcggtgaagatgcgggagaagcgctgacgaaccacgaagcggttgataaaattgcctttaccggttccactgaaatcggaaagaaaatcatgtccaccgcagcgaaaagcattaagcgtgtgacattggagctgggcggaaaatcgcctaatattcttctgccggatgcgaatttgaaaaaagccatcccgggcgctttaaacggtgtgatgtttaaccagggtcaagtctgctgtgcgggctcacgtgtcttcattcataaagaccaatatgatgaagtggttgatgaaatggcgtcctatgctgagtcactccgccaaggagcgggacttcataaagatactcaaatcgggcctctcgtaagcaaggaacagcatgagcgcgttctttcctatattcaaaaaggaaaagatgaaggagcaaaagcagtgaccggcggaagctgtccttttgaagcaggatattttgtcgcaccgactgtgtttgcgaatgttgaagacgaaatgaccatcgcaaaagaagaaattttcggacccgtgctgactgcaattccgtacgaaacagtcgatgaagttattgaacgggcaaaccattcagaatatgggcttgcagccggactatggacagagaacgtcaagcaggctcactatatcgcggaccgacttcaagccggaaccgtttgggtcaactgctataatgtgtttgacgcggcgtctccatttggcggttataaacagtcaggactcggacgagaaatgggatcatatgccttggataattacacagaagtcaaaagtgtatggataaaccttgaagactaacatgtatatttaaaaaactgctgcctgccagcagtttttttctttctgtaatggcggtaaaagacgctgaatatatatgcttctgaaggagttgagcgtgatgggcacacttcaggagaaagtgaggcgttttcaaaagaaaaccattacggagttaagagacaggcaaaatgctgatggttcatggacattttgctttgaaggaccaatcatgacaaattccttttttattttgctccttacctcactagatgaaggcgaaaacgaaaaagaactgatatcagcccttgcagccggcattcatgcaaaacagcagcccgacggcacatttatcaactatcccgatgaaacgcgcggaaatctaacggctaccgtccaaggatatgtcgggatgctggcttcaggatgttttcacagatctgagccgcacatgaagaaagctgaacaatttatcatctcacatggcggtttgagacatgttcattttatgacaaaatggatgcttgccgcgaacgggctttatccttggcctgctttgtatttaccattatcactcatggcgctccccccaacattgccgattcatttctatcagttcagctcatatgcccgtattcattttgctcctatggctgtaacactcaatcagcgatttgtccttattaaccgcaatatttcatctcttcaccatctcgatccgcacatgacaaaaaatcctttcacttggcttcggtctgatgctttcgaagaaagagatctcacgtctattttgtcacattggaaacgcgtttttcatgcaccatttgcttttcagcagctgggcctacagacagctaaaacgtatatgctggaccggattgaaaaagacggaacattatacagctatgcgagcgcaaccatatatatggtttacagccttctgtcacttggtgtgtcacgctattctcctgttatcaggagggcgattaccggcattaaatcactggtgactaaatgcaacgggattccttatctggaaaactctacttcaactgtttgggatacagctctaatcagctatgcccttcaaaaaaatggtgtgaccgaaatggatggctctgttacaaaagcagccgactttttgctagaacgccagcataccaaaatagcagattggtctgtcaaaaatccaaattcagttcctggcggctgggggttttcaaacattaatacaaataaccctgactgtgacgacactgcagccgttttaaaggcgattccccgcaatcattctcctgcagcatgggagcgaggggtatcttggcttttatcgatgcaaaacaatgacggcggattttctgctttcgaaaaaaatgtgaaccatccactgatccgccttctgccgcttgaatccgccgaggacgctgcagttgacccttcaaccgccgacctcaccggacgtgtactgcactttttaggcgagaaagttggcttcacagaaaaacatcaacatattcgacgcgcagtgaagtggcttttcgaacatcaggaacaaaatgggtcttggtacggcagatggggtgtttgctacatttacggcacttgggctgctcttactggtatgcatgcatgcggggttgaccgaaagcatcccggtatacaaaaggctctgcgttggctcaaatccatacaaaatgatgacggaagctggggagaatcctgcaaaagcgccgaaatcaaaacatatgtaccgcttcatagaggaaccattgtacaaacggcctgggctttagacgctttgctcacatatgaaaattccgaacacccgtcagttgtgaaaggcttgcaataccttaccgacagcagttcgcatagcgccgatagcctcgcgtatccagcagggatcggattgccgaagcaattttatattcgctatcacagttatccatatgtattctctttgctggctgtcggaaagtatttagattctattgaaaaggagacagcaaatgaaacgtgaatcttatcaaacggaaatgttcaattggtgtgaagccctaaaagatcagattcaaaagcgaggtcagcttgaccagtttgaagatcaaatcgacaagatgattgaggctctggaagatgaccaaacaacagaagaagattggtataaacaggccgctgccctttatcgggatattacagaatcagatgatacaagtgaaagacgcgcttatgtccctatagggaaacacgtgctgccaaagcttccttacaaatactccgccttagaaccttatatttcacgcgatattatggtccttcatcatacaaaacatcatcaaagctatgtcgatggcctgaacaaagcagaatcagagcttaaaaaagcgagagcaacaaagaattatgacttaatcactcattgggaaagagagcttgcgttccatggagcaggccattatttgcacagtattttttggttttctatgcatccaaacggaaagcggcgtcctacaggagcattgttccaaatgatagacctttcatttggaagctattccgcttttaaagaacattttacccaagccgctaaaaaagtggaaggcgtcggctgggccattctggtctgggcacctcgatcaggacggctggagattttaacggcagaaaaacaccagctcttcagccaatgggatgtaattccccttttaccgcttgacgtatgggagcatgcctactatttgcaatataaaaatgaccgggccagctatgtagaccactggtggaatgtcgtggattggcgcgaggcagaaaaacgttttgagcaggcaaaagaagtcgtttggaagctctattaaaaaaagccccctttccccgggggcttcgtgttttaaaaaatccctaccacatgcaaaaacacgatgatgatggcaacaggagatagatatcgaatgagcagcagccaaaccgcaaaccactttcgtttgagattggaaccgcttttcagctcgtcaaacaaatcctgtttcggtatttttagcggtacaaaaatcgaaatcagtaacgcacctaacggcattaaaatattgctcacaagatagtcggccgcatcaaaaatagacagatgaaatatagagacgtcacttaagacaccgtatgacaatgcagacggcacaccgacaataaaaatagcaattccgcctaaccaagcgaatcgttttctcttattgacatcgcctttcgaaagtactgcgaccaaaatttccagcattgaaaaagcagatgtcaatgcagcaaataaaaatagaagtaaaaatgctaataaaaagataattccgaacggcatttgattaaacacagtcggcagcacgttaaataacagaaccgggccttggtctggtttgaggccgaatgaaaagacagctggaaaaatcgcaattccggccattacagcaacaagcatgttcataacagttacagatacagcggactgtaccagattttcctgtttctctaaataagcgctatacgttaccatgacagatacaccgacacttaataagaaaaaggattgtcccattgcatataaaatggtattggcatcaattgcagttaaatcaggcatcaggaaaaatttgattccttccatcgcgccatcaagtgtaaccgagcgcaccattaaaatgatgaataatagaaaaagcgccggcattaatacttggcttgctttttcaattccgctgcttaccccttttgcaacaactaaaattgttaccaccataaagagcagctggcctcctacagccaaataaggatttgaaatggtacttgcaaatatcgtatcaaaaccagatgtctgcgataaaccgccagtgaagccttttataatataaattaaaatccatccgccgacgacactgtagaaagatagaagaataaagcatgtcaccatgcctaaataaccgatccaatgccacttcgttcctggagcaagtgttttataggactgaacggcatctttctgtgttcttctgcctatgatgaattcacctaacaataaaggcagtccgattaaaaccgtaaataaaataaaaataagtaaaaatgcgcctcctccgctggttccggcgacatatgggaatttccatatcgcaccaagcccgatagctgatcctgccgcggctaaaataaagccgagcttcgaagaccattgatttgcttccttcaccgtatcactcctatttgatctaaccattataaaagttcattgtaagaatatcttcctatatagtcaagaacattttgattagtttacatcttatatctatatacatctgccaaaaactaatattgaattattcagaaaattatttataataagagaatgttatgaaatttgtaagaatttctgctgaagttcttgataagtgtgttaggagtgtttttatggacatcattagaaaaataagtcatttcgcaggacaaacctttggcatatgggtcattgtttttgcagtgctgggattttctttcccatctttatttacgtggatcagttcttatattacgatttttcttggcattatcatgtttgggatgggccttacactgcaagccgatgatttcaaagagctggtcagaaagccttggcaagttattattggagtaatagctcagtatacgatcatgccgctcgttgctttcggcctcgcatttgggcttcatcttccagctgaaatcgcagttggtgttattcttgtcggctgctgtcccgggggaactgcatctaatgttatgacattcttagcaaaaggaaatactgccctttctgttgcggttacgacaatttctaccttattggcacctgttgtaacaccgttgttgattatgctgtttgccaaagaatggcttcctgtctcgccggggtctttgtttatctcaattttacaggcggttttatttccgatcattgcaggtctgattgtcaaaatgtttttcagaaaacaagtggcaaaagccgtacatgcccttccgcttgtttctgtcattggcatcgttgcgattgtctcagctgtcgtcagcggcaatcgggaaaatctgcttcaatcggggttgctcattttttcagttgttatcctgcataacggtatcggttatttacttgggtttttttgtgcaaagcttttaaaaatggattacccgtctcaaaaagcgattgcaatcgaagtcggcatgcaaaactccgggcttggggctgcacttgccacggctcatttctcaccgctatcggccgtaccaagcgcaatattcagtgtgtggcataacctttcaggttctatgcttgcaacatattggtcaaaaaaagtgaaaaagaaacaagctggatccaaaagcagcaatctatcactttaaatatgcatcaaaaaaggtacatcactttatcgtgatgtacccttttttattatccttctaataaaagctgttcaggatcttccagtaaatttttgattgtcacgaggaagccaaccgcttctttaccgtctacaatccggtgatcataagataaagcgagatacatcatcggacggttttcgaaacgctcttcatcaattgctactgggcgcagctgaatcttatgcatgcccagtataccgacttgagggctgtttaagatcggagttgacatcagtgaaccgaaagtccctccattggtaatcgtgaaggaacctccctgaagctcgctaagggttaatttattgtttcttgcttttttcgcaagctcgccgatctctttttcgattcctgcaaatgtcaggcggtccgcatctcgtactaccggtacgacaaggccttcatcagcagcaacagcgataccgatatcatagaatttcttaacgatcaactcatcgccctgaatttccgcattcaacagcggatattttttcaatgcagccacgaccgctttcgtgaagaaagacataaagccgagcttcacttcgttttgctcaaagaattgatctttgcggcgttttctgagattcataacagccgtcatgtccacttcattaaatgtagtcagcatcgccgatgtttgctgcacctctacaaggcgttttgcaatcgtttgtctgcggcgtgacattttttgcacttcgacaggtttatcaaagctttgctgtgcttttggagcctgaggctgctgcttttgctgaggagccggttttgatgccggtttttcgtacgcttcgacatcctgcttgcgcactcttccaagcggatctccagttggaacttgagacaggtcaattcctttttctctcgccagcttacgggccgacggagaagcgatcgttcttgattttgcttcagattgtgcttcctcgctcacctcttgtgcagctggttcagcctgtttctcttctttcacgctttccttgctttctgctttctctgtaggagcaggggcagaactttcacccgcgccttctgaaatcgtaccgataatttctccgacctggacggtatcacccgaatctttcaatacctcttgaagtacacccgattcttctgctgtcaattcaacattcactttatccgtttctagttcaagcagatattcaccctgttctacatagtcaccaggctgctttaaccattgggctattgttccttctgagattgattctgctaattcaggtaccttaatttccgccattttttcatttcccccttagtttttgcgagtcaagctatcagatacaatacgttcctgttcttttttatgaactgtcggatctccctctgcagggctggatcgtcttcttcgtccaatatattgaacgcttactccctctggtgcaatctctgtcaaatacgggctgatataaccccaagcccccatgttctgcggctcttcctgcacccaaacgatttctttcaggttcggaagttttgcaaataactctttgactccttttgccgggaatggatacaactgttcaattctcgcaatgtgaagccactctttaccgtcttctaacttattaaaatgatcactgatgtctatagacactttaccgctggataatacaagtctggttactttttcatagtcatgagaaagtcccgactgttcataaacaggctggaagcggctttcgctgagctcctgcacttccgacaccgtatttgggttgcgaagaaggctcttcggcgtcataatgacgagcggtctgatttcttcacgaagcagcattttagcctgtcttcttaaaatatggaaatactgtgccgcgcttgtcaggttggcaaccgtccagttgttttctgctgcaagctgcaggaatcgctcgattcttccgcttgagtgctcaggcccctgtccctcgtagccgtgcggaagcagcatgactaatccggatttttggccccatttcgcgcgtccggcagaaataaattggtcaaaatacacttgagcagcgttggcaaaatctccgtactgcgcttcccacaaaacaagcgtttccggtgaatgcacgttatagccgtattcaaaaccgagaaccgatccttcagacagagggctgttatgaacagcaaatgatgtgctgcagtcagataagtgatgaagcggcacaaattcttcgcccgtctcactgtcatgaagcacaaggtttctttgggcgaacgttccgcgctcggaatcctgtcctgttaaacgaatcggtgttccgtctttcaaaattgaagcaaacgcgagtgattctgccaaagaccattccacttttctgtcatcatcgaacgccttggcgcgtctttctaaaatgcgctttagcttgccgaaaacattaaatgactccggccagttgatcaattcgccattcagcttgcggagcacatcaaaatcaatcgaagtgtccacatctgggaaaccgtttgatacaggctctggaagttcaatttcacaggcagtgtgttcctttttagacggaactttctgatatgcatcttcaatgcgcttcgttaccgatttttcgatgttttgaacgacttcctcggtaagtacgccttcttttaccagcttttcagcgaaaatttgtttgacggtcggatgctttctgacagcatcatacaacattggctgagtggttgacggttcatccatttcgttgtgtccatagcgtctgtacccgatcaaatcaatcagaaaatccttgttgaatgtttttcggtattcgaccgcaaacttaacagctgaaagacaagcttcaggatcgtccgcattcacgtgaacaatcggaatttcataacccttggccaggtcgctggcatattttgtcgatctggattcagcgctttctgttgtaaatccgatcatgttattggcgataatatgaatcgcaccgcctacttgatacccttttaaagaacttaaattcaatgtttcagctacaattccttccccagggaatgcagcgtctccatggattaaaatggccagcgattttgtttcatcttgtaccgggtatccgctttgtgttcgcgtttcctgtgccgctcttgtgctgccttcaacaatcggattgataaattccaagtggctcgggttgttcgctaacgtaatgcgcgctgattttgtttcagcgtcttgaagctcccgattcgcccccaaatggtatttgacatcccctgtccatccgtagctgattccaattgatccctcagacgggacaagatctttattcggcgcatgctggaattcagagaagatgatttcatacggtttgccgagcacatgtgccaagacattcaggcgtcccctgtgcgccatcccgatgttgacacttgtcgtgcctgatttgacagattgtgcaataatgtcatcaagcactggaacaagagcgtccagaccctcaatggaaaagcgcttctgcccgacgaatgtgcggtgcaaaaactgctcgaagccctctacttcagtcagtctttccagcacagccgacagcttttcagctgagttcttctggaacagctcgccagattcaatctttcttgtcagccactcgcgctctttgaagtcatgcacatggtcaaattcaaaagagatggttcttttatacgtatttcgtaaatactgaatggcttctaaaccgttcgtaatgtttttaggagcgtctttgcagatgacagacgcaggtattgcttttatttcctcttctgttagcccgtaatcggataatggaaaaagttcgctctttttctcatcctttctgagcggattgacggaagcgttcaaatggccataggttcgaatatcttctgcaagtctgactgcggatgcgatcttttgaatcagatcggctgtaacacgtcccttttcttttgttcccgaggcctcttttatatcgcttggcggagcaccgagctcgtcgaacatttccttcaaatccgggtcaatgctgttcggatcctgggtatactgatcgtaaagctccagcgcatagccgaggttcggaccgtaaaaatcttcccaattcattcgttgtttcatactattttgaaacatttgaatattacccccaacttaaataatcaagtgatcgattcactatcttgaaataactttcgaacgctgtgtccaaaattatgtaataaaaacgcttccaacgatattttaccactgtttgcaatttgattctaccttgattgttcacaaaatagtaaaaaacctttataaaaaacaaaaaatttaatcattcgaaaaaacaaacgccaaaaagcataggattaagggctatcctatgcttttatgaagcagttttttcagcagcggatacaaaacatccggtagctgatcaacatccgggacaaatatactgaattttccgtacatatcctgaatcgtcttcatttgcgattcttctatttctgagttggagagaaaaacatttatcacttctattcctctttttcgggcttcgataaccgcctcacttgtatcgacgatcccattttgttcgtagccaaatgcggccggctctccatctgagaaaacaattaagaacttttgcgcctcgctgcgatgcagcatttttttcgtcatctgcctaattgcgtacccgtcacggttatcttcttctggctcaagctgcataatggccggtccagaatcttgtcttaatgatgattggaagggaataaccgtattgaaatagtttggttggcttgtttcggttgcatcatttgtgtcctcccagaaaccgacaatctgatgcggaaccgctaccgatttcaacgcttcgtgaaacagcacgattcctcgttttgtttcgtccattttgtcgaacatgctggcggaacaatcgaccagcaatgtaaaaactgcgtcgatttctgtagacggttcttgctttttgtagaacaggcgcggatttcgctcagtgaagtaacgaagaagcttattattcagtctcccggcatgaagatctgttctcggcaatgtttttttatgctccagcgttttttgaatcatttgtttcaaacgcttttgatacgattcaatcgtttttgcctgctgtttataagaaagctcctcttcactagttgccggctgcggttctttataaattggaaatgcatatttattttctttgccgtcagccatacccgctccgttcggctggtctttttgagactccagcgcttccagcttggaatagtctttccgtttcgtatgtctggctgatccttgaacagagccaagggcctgatctccatcgtcgccttcccttgaagcatcttttcctaaatctgattttgcgccgtgttcaatatcaaattgaaggaagcttttagacggtgcttctgtttcccggtgccatgtcggcatttcttcttcatggatatcctcatcaccgtctgatttttttggaagcgtgatgtcatcactcagcttcggcgcttttttctcttcttcaaataacggctgttctgcagcttttgcgtagtcaagctcaggcaaaaagaagtaggtgttcaacatgtctttatcgagcacctcttcaagtccgtccatgaggtcctcaacaattttcagaacctgccgtgtcgaatctacttcatacacacgcaagagctgctgctcaataaacgggcgcatcagatcgatatcttcacgcatggatggaagggtctcgagcggcgattccgctgtgagcttgacatagatcgcgcaaaagagcgcatcggtaaaaatgcttcgttccaaatttaaggtcagctgggttgagaaatgttttctgtacatgtcttttcgcttcgcaaatacatgtttcgtacccggacgctcacgtttgatgcattcttcgatcctaatgtcttcaagcagcataaagagctgcttggcaaaacttttaaaggtgagatgacgatggatatcattcaaaaagttcgcaaactcatgcagcgagctatatcttgttccgactgaacgcaggtagacgtcgcttttcagacccgcttccatgtcctcagctgccctgtctttccaaaagtggctcatatagattttcttttcaaatggattgtaataggactgaacgccatactccacttctaccgcttcactcttggtgagtgttttggccaaatcagtcagcatcataaataaaaatgaatcaatcgtgctgtcgttaaatttgataaatttcatcgcagccccctcattcaaacagagtttctgcaatatttcggacggccgctttttcccgatcatcatcaagcttttctacaattccccgctcaatggcacgacgcggcggaatataagcagctaaatcacatgtatcgattaaagctctgatggatgccgcttcttcagacacctgtccgttattggcctgaacgatcaagtcagaggaaagcgtgataaatctgtcaatcaatttctcgtctttcaaggctgactgagacatgagcacttgtttcagcagctcgcctttaatataaggcacatcaatgatgacaaaacggtttttcaacgcttcattcagaggaacagttccgacatagccttcattgatggctgcaatgactccgaaaccgcttttagcccgtatgacctcgcctgtaaacggatttgtcatcatttttctgtaatctaatacaccgtttaaaataggcagtgtttccggcttcgccatattgatttcatctatataaagaaaatggccttccttcattgcctttgtaacaggtcctgaaacaaactcgattgtcgcctggccagattgattttcaatcgttttataaccgaccaatgcctcagcatccaagtcgactgaacagttgacgctgtgcatcggtttatgaaaatagctggacaatgtttctgccaactttgtttttcctgaacctgtaggccctttcagcaggacattttttcccatggctaatgcaataatggcgtcaaatagaatggcttcatcctccgcctcatagcctgatgttcctataagcgattgaaactccggggaaataggctgctctttatatgataaaagcttttgttgtatatcttccggcaatgttaagtgctgtagttgtgttgtcatagacagattccctttcctattcatattccttaacgagtatactaaaaaagcccctgtatgctcaatacaaaagggcttggatgatattactgcttctcgttatttcccaaaagggctccgcagacaatacgcgcaccggaattgccgcttgggtttgtcagataatcgtccgcttgttcatgaataataaatgcacttccgtcctcgtcgagaatatttagtttacttccttttttcagtgaagtgtcaggcgcattcattatgacatctacctttccatcagcaccgacttcaaggttcggcagatctccggcatgatgccccatcggattattgaagccgtgttctttgttcagtggattaaagggaccgcccgctgattcaaaatccggcctgacacaagaacctttctcataaatatgaaaaccgagagaagcacctggacgcaggctgtttgcggaaatatgaatatcgaggccttcatcatctgattctttgatctctataaagccgactgctttcccttcacgattgaccaactggacatgatgaccaaacgctgacgtttcaaccacttttttttccggcacccggttaggagggtctggaggttttttttgtccgcatccggcaactcccagtgccgtcagcatcatcaacagcaagagacggtacatactgtctcccccttgttttttctaacagtgtggtcaatcattgtctggtataaacaaaaaagcctataaaaggctttttgtcatactcatttttaaaaataacttcttgcgcccaagtaccgctgtttccaatacgaattgctgagattggaaatgtcgacgcccgatgagcttgcatgaataaaatcaccgccgcctagataaatccccatgtgagacgggccggatttatatgtggtaaagaagacaaagtctcctactgacggctggctgactttctgcatgacattccaataccctgccgtactcaatcttgatatagatgatacattattaatgaggtaataaatgaagccgctgcaatcaaaaccggcaggcgtgtttccgccccatcggtaaggcactccgacatattttttcgcttccgttatcattctgtcaatcttcgagcctatttgaatgtttgaccctgagttatcttttggctttgttggctttgtcggatttgaaggattagattttgatgctcccgaaatagtcagaacctgcccgatttgcaacacatccgatgataaattgtttttatcacggatgctttggacagtgactccgagccgatttgcaattttccacagcgaatcgcctgcttttaccttgtacgtcgttgtttttgagggattggagtttgacggcttttttgaaccgctgtttccgctcttcggtgagctgcttccttttattttgagcacctgtttagggtaaagtgtatctgatgttaagccatttaaggtttttaattcagctacagtcatatttaagctgtttgcgattttccacagtgagtcaccaagcttgaccgtatatgtactttttgaagaacctgaagaattggaaccgctgtttttctttgatccatttgatccgcttgaactgcttgtccctttgatcttaagcttttgccccggacgaatcaggtcactgctcaggctgtttaagcttttaagctcagaaacactcattttatgatttttagcaatcatccatagggaatcaccatatgcaactgtgtatgttgatgttttgcttgaattagatggggatgtcgtgctttttttgctgctttcaggaaccttaagactttgtccgacataaagcaccgttgatttcaatttgttttcggatttcagagctgatattgtcgtatcatactggcgggaaagtttccaaagagagtcaccgctttttacttttatcgtttttgcttccgcgggtgctgcggccatcgacgacccaacaactgcagaaacagccaagccggctacaatcttctttttcattcattcaacctcctaaactgttttttgcaaaaacagctagtattttgtttccaaaaatggcacgcaactgttttatcgtcaatttttcagcaagttaaacccttttcaaacatttggcagcattttcagcatcgttcgacctttaaaccttcaaataaacatctaacattttacataagcacgatatgtttttcgaaagtctaaggaactatttaagcgagggtaaaaatgatggttttctattgatgaacgaagcagtttctcctcctttcttgtctatttttctaatcaattctctatcggcgtgtcaaatccctcttatgaaatggcaaaaagcctgttctttcgataagaacaggcttttacactatgcatttgctgattgagttttttgttttacagcttcaagaatgctatcggccgcttttttagagccgcctgccgctttcagtgattgtccaatttcttttgccttttcagcatacgaaccattattcattacatcttgtatcgtctctttcagaaggctttcagataattcttctttttttaacacttttcctgcgccgactttttccacctgatctgcgacaacaaattggtcgcctcccatcggaatgacaacgagcggggtttcaaaatacaaaccttcacttgtgctgttcattccgccgtgtgtcacaaataagctggctcttttcaagatctcaagctgagggacatacgggcgtacaatgaaattctccggaatgtcgtttaactcacttgttttaatatgcttgccgatggaaagcacaactttaccgtcaaagtccttacacacttcaaggcattgattaaaaaactgcttttgattattaaaaatggttcccattgaaataaacagcacgttttcattgtcaatctgatcaaatgggaaatcattgtttccggctctttctgtaatggaaggaccgacaaatacatatcgctcgccaaattgctcagccagtggctgaaatccccttgatgtaaagacgattgtcaagtcaccatcagctaaaaaaacatcaaatggcttcttgatctctgcttgaaaatcagcatttaacgtttctgcaagctgctggtatgattcataatgaggcgaatcttcaagtgatcctttcatgtacgctcccatcatttccttcgcaaattcctcattcatcgcaaaggttgtacacaatgaaaatcttggcagcttcagcatgttggcaatgactttacccgcgagaagatggtgatcatatatgacataatcatacgattcatgtttgacttcctcataaatatgagtcgcgatatccttacaggctttcaaaaaagcgcagagcatttctgtgaaatctctttcttcatcgccggttgcgtttttcccgaagtaatctcctctgaaatcatgatactcacgaaactctatatcaagagctgtgattttttctttatattccttcactgcgtagtacgtaatgttttctccccgggatttcagctccttcatcacaccgatagagggattaatatgcccttcaccgggaaaaccgatcattaatacattagccatgcgacagcacccttcctttgaaaatttatgtaatattttatacggtactataaatacataaacaggtaaagtatttcacttaattaatattcattacatataacttttctaccagtttatatttcctgtcttcaagacaaaaagcattcagcttgaagcgaatgctttaataaagatacgaattcagtcattttgtctcatgataggattcttaatcaggccctttttattatttttacgttcttggtgaaattaacggatataatacaccgtctttggcaaacgacatcttccctgtttcctctgaaaccacgagcaccagtgcatccgtatagcccgacataccgagagccgcccggtgccgggttcccaaatggatatccacttccttcgtcgtcagcgggagcacattggctgctgacacgagtttgttttccctcactaacaaagcgccgtcatgaagagggtttccggggaaaaagatgctttcaattaatgaagagctgatctcggcgtgtagggaggtgcctttttgaataaaatgttcaaccgggtccgctctttcaatcacaattaaagctccatgcttatgttccgataaggctttaatcgccttggccagctcaataaatgccggcgtaaattcctcaatgtatgattgcaaataaaaggaggatgcaatcccctgcatgtcctgaaatatgtgccccaaatcatctaattcacaaaggagacactggtctttttcgtgaagcgttttcaagattagagatgcatcacctaatatttgctctaggtacacctgtattttccccttgaacgcattttctgatatctgctcatagcgcataatcttcatctcctgttcaaatttccaacttttcacgaatgcttatcttattgatgcacattctattggtaaaggagggatgtaaagaatggaaatcgaaagaatcattcagtatatttgcacctttttaggcgtgatttcgctttcttttatttatgcccaaatgtttagaaaaacgaaaccgacaaaaaaagaataggcccggcgttcattgctttttatacataaaatgttataatttctctcgttatgaaaaagaaacggagatcaatgtatgaaagaaactcaaaacgcccgggaaaaaatcaaacagctcttgcacattttaataccgatattcattacccaggcggggctttctcttatgacttttctagatacggtgatgtcagggaaagtcagccccgctgatttagcgggtgtcgcaattggctcaagcctttggacccctgtttacacaggacttgcaggtatattaatggcggtcaccccgattgtcgctcagttattaggcgcagagaaaaaacagaagattccctttactgttttacaggctgtatacgtggccgcgctacttagcatcgccgttttattgattggatatgctgcagttgaccttattcttggccgattgaaccttgatattcacgtgcatcagattgctaaacactttttaggctttttatcactgggaattttccctttatttgtttacaccgtgttgagatcattcatcgactcattaggaaaaacgagagtcaccatgatgattacactcagttctcttccgatcaattttgtattgaattatgtatttatcttcgggaagttcggaatgccggcacttgggggtgtcggcgcggggctggcatccgctttaacttattggtgtatctgcatcatcagttttttcattattcataaaaacgcaccgttttctgaatacgggattttccttaccttgtataagttctcttggaaagcatgcaaaaatttgctcaaaatcgggctgcctattgggttcgccgtgttttttgaaacgagcattttcgcagctgtcacgcttctcatgagccattttcatacagtgaccatcgcgtcccaccaggcagccatgaattttgcgtctcttttatatatgctgccgcttagcgtgtccatggctctaacaattgttgtcggatttgaagcgggtgcagcccgttttaaggatgcacgctcatatagcttaattggcatcatgatggcgatcggcttttctttgttcactgccgcctgtatccttttattcagagagcaaattgcgggcatgtacacttctgaccccgatgtgctccggctgacacagcactttttaatttatgcgctattttttcagctttccgatgctgttgccgcaccgatccagggagcactcagagggtacaaagatgtgaactatacgcttgcggccgcttttgtctcttactgggtcattggccttccggtcggttttatggtcggtacgtttacaagcctcggtgcattcggctattggattggattaatagcgggactcgccgccggagcagttgggctgtttttcaggctggcaaaactgcaaaaacgttattcgcaaaaacaacacatttaaaagaggtgatcaatcatggcaaaaaacaaaaaattattcgagtatctttcccagcatgcggaaaccatcagttcaacatggtatgaaacaatcgaggagactgatcccaattccatttatgcctcaacagatcctgttgtcattcacaatttaaagagccagaatcttgcctttaactataaaataaaccgtatttttatagatgatgaggacgtatacttgcctatactgaaagaatgggcctttgaagtcacacaggatcaagagcatttaaaaactcctatccactatattattcgggagtttgtcagagtgagagatttatatgtttcctatgtgaaagaatttgtccatctcaatcaggatactgtgaaaagcgaagaagccgaagacctgtatcacgcccttataaaagcgtttgatcttgtgattcatatttttatagaagaaatgtacaaaaacacaagccttcagcttcaggcccaaaaagatatgattactgaattgagcgctccggtcattgtgctgtttcacagcgtcggactgctgcctttaatcggagatattgatacagtccgcgccaagctgattatggaaaacacactgcatcaatgtgcgaaaaaaaaggtgacacaactgtatattgatttgtcaggagtagctgtgattgatacgatggttgcccatcagctgttcagtctgattgaggcgcttcgtttaatcggtgtttcttcaactttgtctggaatccgtccggaaatcgcgcaaacagcggttcagctaggtttgtctttcgaaggtatttccttgagatccactctcgcttcagcaattgcatcggacttaaaattaaaaaaggtataaggcttaaggccttatacctttttgattaatcattccattgatacgtccaatatatttcttcttcaaaccatgttgccataacaggttcattatttttcaatttctcttcaagctctctgagcatgccttctgtttgtgtgcggtgagctcttaacgcattcattttaatatcagctacttctttgatatcaagtacgacatcagcttcgccgagaacctcttctctgttgcgggtaatggccatgcagattgtacgcggacggtcttctttctttttgcggtacaatgcacggataaccgcttccccgcatgcatcatggtcagggtgcacaccgtgtccgggataaaatgtgacaattaaacttggttttacatcatctatgatctcttccatgatatcagctaaatactcatcatcttcaaattcgagcgttttgtcacggagtccaagcatacgaaggtcattgatatccatttctttgcaagcgttgatgagctcttgttttcttagcagcggcaacgtttcacgattcgcgaaaaatggatcgcccatatttctgcccatttcacctaaagtggcgcaggcatacgtaacgggaatgtctttttttctgtttaaggcaatgaggcctgccactccatatgattcgtcatcagggtgaggcaggattactaatacgtgttctttcattatttttcacccttttctttaaactgtgaacggtttttcactgatttgcagagaaatagccagtttaccgcccggcagatgtcccgccattaataaacggttttcttcatctaccgtgtattcagtcaagccttcagcataaatccagccttcttctgttttcaagccaacgcggtaaggcccgttgcctttgatttttgcctgatgataagtgacttttgcattgcggatatacgcaacaaccgtcatgttcttttcatttaagtgcgctgaataagaacctgtggtggtttctaaatggatatatacagggcggtccgcatatcgttctaaagatgcttgcacatcttcttttatgatcgctttcatgattgctcccctctttcttcttttaaatactctgcacgttctgtatgtaatttgaccagctgatatttcacagccggttcgagctgtgaattcacaatgcgctgaatcgcggcaaaatatttttccagcatcggttttcggagtcttggatgtgttcgtttatccaagagctcaagatcaatcgcctctgctaccgcttctgcgtcatcatgtgcgagagatcggttattccaaagtgaagcatatgctttcactatctctttatcattgtccatcgtcttgctcctttatgtcttacatacatgaaatgattatacataatatatgcatcagctgaaaagccaaaggcctcaatggctttttgacgcccgtttccacttcacttgtgaaaacgtaaacaagatcagcgcagcccatatacagctgaatgtaaaagccttcgagctggaaaatggctcattgtaaacaaacagcccgatcagaagggtaatggtcggcgcaatatattgtaagataccgacttgatacagtggcagccgtttcgctccttccgcaaacaataagagcggcaaagccgtaaacacaccggccaaaaagagaagcagccacgtccctccgctttctgcacccgctggctgaacatgtccgctgaacagcaaataccccaatgcaatgggcataatcatgaatgtttccagcgttaaaccgatggcgctcggcaggcttgttctttttttgcttaacccgtacagcccaaagctgaatgcgagcagaagcgcaacataaggaatggagccgtattggaacgccgagatgatgacaccggctgccgcaatcgaaacggccactaattgcaggcgattcagtttttcctttaaaaataaaatcccaaggagcactgatacaagcggattaatgtaatagccaagactagcctcaagcaaaaagccatggttgacagcccatatgtatacaaaccagttgatcgaaatcaggatagaagcaagaaataaagagaggatccctccgttctttttcagagagcgcagctcctgccatcctattttccattgccgcaagaaaaaaagtacgatacacataaaaacaaaagaccatataatacgatgagacaaaatatcaagagccggcagctgttcgagaagcttccaatagagcggaaacaggccccacatgataaaggaaacggctgtgtaaataacgcctttttttgtttctgaatattgcatttatatccctgcctttctttagagcatcttatattatatcacgtgaaagatctggcgggcatatactattttgtccgtgaagaaaggatgtgaagacaatgtttgagtggaacaagtactttcctttccacaatcaattttctaaagaagcattaaaaaaagctgatccgaaagaagttgaaacgtatgtcaatcgtgtgatggaaagtgtgttcggcagtgattatgcggctcaatttcctttccgcgatcctcttccccaaaaagaacagcccgccaaacctgatgcaaaacctgatattgatatattcgaaacagcagaccatgtgtttgtaaaggtgccaatcagcgaagaatggctggaacaagtgagaatcaaacacacatctcacgaattatggttggaaaacttcccaagagcagatcatccgaaaaaagtaaaccttccttgtttagtcaaacgcaaaggaacaaaagccgtctataaggatggccttctggaagtcatgtttcaaaagcagcaagactacaatatgtccgaggtagaaatcatccgataaaaaacggcctgcaatcgatgcaggccgttttttattaatagaaaccgggatatcccccgtatggcacgccggcaccaaaaccgtacggtccgcctccatatccataagggccaggaggataggcatagggacgagaatagttaaacagcgcactcccgagaaaaccgcctaataaaccgccgactagaggagcgccaaacaaaaaaggactacgcgccggatatccggctggacctgggattccgcgtaaatacgaatgatgagggtacatgaatttttcctcctttatgtctgcctatacgtaaagtattcagcaaggaagaaaaacgattgggctacggactgtctatgattgttacatcacaagccctgccaataacacacagccgagccctgtaaccgaaagaactgttgtaagcagcgtccaggtttgaaatgtttctttcatactcaagccgaaaaattcctttaccatccaaaatcctgcatcatttacatgacacgcaatgacactgccggctcctgttgcaagcaccattaacgcggggtttacactgccagcctctataagcggagctgccattcccgctgtggtaagcgcagccacggtagcagagcctagacacagacgcaaaaccgcggcgatggtccatgcaacgaatagcggcgacatgtttgtttgacggaaaaaatcagcgacataatcgccgaccccgccgtcaatcagcacctgtttaaacgctcctccccctcctatgatgagcagcatcatcgcaatttgcgaaattgattctgaaatagatctgctgatttcctgcatagatattttacgggcatatcccatcgtatagagtgcaagcaacagcgaaatgagcattgccgttcccggagtgccgataaattctataatgtcttttccttttgaatgttcactcaataataaagaaaaaactgttgccattgccataaagataaccgggaataaagacgtgacagcactgatcgcaaagcccggtgtttcattcagctgaaattctttccttggtcctaaccccgataggtttccatgcttttgatacgcaccaggaaaccgtttcatcgcaaatttattaaataaaggcccggcaatcacagttgtcggaacagcgatgatgattccaaaaagcagcacctagccaatatgggcaccatatgcaactgagatagcagttggagcaggatgtgggggcaaaaatccgtgagtaacatttaaggcggcggccatcgggattcccagatacagaaaagacatttttaattctttagcaatcgcgtaaacaatcggtatcaacagaacaagacccacttcaaaaaacagcgcaataccgatgataaaagaggcaaccacaaccgccgcctgtattcgtttcctcccgaatttgccaatcagcgtaatggcaatccgatagccgcccccagcatctgagacaagcctcccaagcatcgcgccaagtccaaacactaaagctaaatgccccagctgcccgccaattccagcctcaattgaaagaacaattttattgatatccattccaagtccgatctctactaaaaatgaaacgacaatcagtgagacaaaggtatttaattttactttaataatgagaaataacagaatcagcactccgacagctacaattaaaatcggcatggtacccctccaaaagtgttttatatgattctcgcgacaatgttttggcgtttttcatgcctagacgaacagaaaacgctttcattaataactaaaaacgtcttggttatatgattgttatcttttgatcaactaatatgttcatactaatctcctaatcaatgactgtcatcgtttttatgagcttgtctcgattacctaccgcctaacccaatgatttattagttatatgttgattaacttttggttatatgttatgttttttaaagttgactgccaatcattatatctattcattgtctggaagcaaatgagacaatatgagaacagacggataacaacttcacagaaggaggagtacacatgccattattgcgttttgatgtaattgagggccgtgatgaaaaatcgctgcaattgttattagatactgctcaccaagcgatggttgaagcatttggtgttccggaaagagaccgttatcaaattgtccatcagcatcccgcaaacgagcttataatccaagatacgggattagggtttcagagaaccaaggatctggtcatcattagtatgacaagcaaagcaagaaccgaaagccaaaaggaaaaattgtatgctctgcttgctgaaaggctagaagaaaaatgcggaatttcccctgaagacctcatggtatctattactgagaatggtgacgcagactggagtttcggtcttggtgaggcgcaatttttgaatggaaaactataaaatttcgtctccccacaaaaaaaagaagagagagctccaagaagctctctctttttttcataaatgcggaagtcatcagtatagaagcatccagcaatacgaaaaacctggatctccttattagatccggtttaaacgccaattggatgctgactgggttttggccgaaaatataaaattttgctgatttgcataataagataactcataatccccatttacaacaggttggatgctataacttattgatcatttccatgaacatgacacttttgccaatccggaaatgtcagtctgacaaatataaaaagtcatgtaaacggggtgtgaaccgtacttacatgactcaccatggaaacaaaggctctttttcagacgccgctttccttatttctcttcttcacacactgtgtcaccaggctcgcaaaattgatcggcccatgcctgcatctcttgaaatacagcttgaagcgctgttcctttttcagtcagcgtgtagatgactttgaccggcgtttcagggagaacctgccgttcgacaatctcgttttgttcaagctccttcaagcgctctgccaacattttttggctgatcatcggtattgtttccgttatctctttaaaccgtttcggcccatccattagcacatggatgatcagaccgttccatcgttttcccagcaatgagaatgcggattccattttagggcacatcgtatttcccacaagtcttcatcccttcatctattgattgacatgtattcaatgatccattacaataatctttcaagttacatttagtaagcttctaacttttctattatcataccacgtttatccgaaggaggaaacactatgacgaatactctggatgttttaaaagcacgtgcatctgtaaaggaatatgatacaaatgccccgatctctaaggaggagctgactgagctattagaccttgccactaaagcgccttccgcttggaaccttcagcattggcattttacagtattccacagcgatgaatcaaaagcggagcttcttcctgtagcgtataatcaaaaacaaatcgttgagtcttctgctgttgttgccattttaggcgatttaaaggcaaatgaaaacggtgaagaagtttatgctgaattagcaagccaaggctatattacggatgaaatcaaacaaacattgcttggccaaatcaacggtgcttaccaaagcgagcaattcgcacgtgattctgctttcttaaatgcttctttagctgctatgcagcttatgattgccgcaaaagcaaaaggttatgacacttgcgcaatcggcggatttaacaaagagcagttccaaaagcaatttgatatcagtgagcgctatgttccggttatgcttatttcaatcggcaaagcagtgaagcctgcgcatcaaagcaaccgtctgccgctttcaaaagtatcaacttggctgtaaggatatgaaaaaccttagtccgaaatccggactaaggtttttttatacaatcgcctctttgtaccattcacgagcctgttcagcttcatgctgagtcagctgatggcccccgtcctgccagtaaacggaggctgatgccccgctgtcacgcaaatagcggtaaagctcttctgattcttccttcgtgcaaagaggatcgtatttcccggcaccgataaaaacagggagccccgccatatcaggcagctcgataccccgaatcggaaccattggatgatgcagaatagccccttttaacacatctttataatgaaaaagcaggcttgccgcaatgtttgcgccgtttgaataaccgactgcaatcactcggccgcgattaaactgatgcgtttctgcagcctcgtcgataaaatctttcaattctcttgtccgcaccacaagatccttttcatcaaaaactccttcactcagacgtttgaaaaatcgcggcattccattttcaagcaccgatcctctgacaccaagcaaatgggcatcagggtctataaaccgccccaatgaaagcagatcgtgttcattaccgcccgtgccatgcaacagcaaaagtacgttgtcagatgttcctttttcataaatatgcttcattataaattcccccttttaaagttcaggtaaaatgtctgtaatttgttgtctatgtttctccagccattcaggcagttttaaggaagtccctagctcagcaaacgtttcatctgtcataaagcccggttcatctgtggcaatttcaaataagataccgcctttctccctgaaataaactgatgtaaagtattccctgtcgagaatttctgacgcaggcagatggttttcagcaataatcggcagccatttcgcctgttcctttttcttagtccgaaacgctacatggtgtaccgtaccatatcctccgactcctcttttttcaggatgtaaatggacatcaatgacaccgccgacggccgctgaggatgccagtctgacaatctggtcttcttcggccactttggtgtatccaaagctttccgttaacaattgtatggtcgcctgcgggtcgtaagaatatagcagcacacctttcattcccgtaattgcttcatttgttgtgatcccgtcaggcgtccactcgcttttgccgcttttcgcatcctccatgatcgccagcggaaggtcttctgtatcgtcaaaaataagacctttttcaccaaacaacgttttttcctctaggctcagcccgcttttctcaagacgctccttccaaaaagacagggagcctgagggaactgaaaagtacacccggcccgcttggccttttcctaccgttccctgtccgcttccttggaacggaaaaaaggtcattattgtaccgggatctccgttttgattcccaaagtaaaaatgatacgtcccgggatcatcaaagtttactgtttttttaacaagtctgagcccaagcacttctgtataaaatcgcaagttttcttgcggatctctggcgaatgctgtgacatggtgcaatccttctgttttcattttctcactcctatttatctcgatttcaagatatttattattttaaacctttattgaaaaggatgcaaaccatgtgttttgtttaaataactgaaaaaatcatttttttctaataattatcttgtgatcttttcttacaactgctattatagtgagcattatcatgtttcaggaggaaagtaaatggttaaaaaagcacttattgttattctcattcttttgccattcgttcagctcgcgcttttgccgcttgtgaatcgaatagaaccgattatgttcggcctgccgtttttccacttttggctgctgctgtggattattgttacgccgttatgctcgtttggcatttatcagatgcaaaaaaaagatggaggacttgaataatgcaagggaatctgactgcacttctcattactgctattattgttttaaccgttgtctgtatcggctttctcgccggaagagacaaatcctcacgtacttctgtggaagaatggtctgtcggcggcagacgcttcggcggtcttctcgtctggtttttagtaggcgctgacctttatacggcctatactttcttagggttgaccagtactgcttttacaggcggaagtgttgcatttttcgccattccttattctgtgttggcctactttatcgcctacttcttctcgccaaaactttggaaagttgcgaaaattcataaattaacaacactcgcggattatgcccgggaacgttttaacagtaagcttttggcaagcctcgttgccatcgttggggtactcatgcttattccgtacatatgccttcagctgagcggcattcaagacacgcttcaggttgccggcactggctatattaacgtaaaattcgttgtgatcatttcatttattcttgttgctctttacacattcttcagcgggattaaagggcccacatatacagccatcattaaggacattttagtatgggtcattatgctgtttatggtggtgtccctccctctcattcattttaacggctggacgccaatgattgacacgttagtgaaggaagcgccgcaaatgctgacgataccggcagaagggccaaaaggcatcccttggtttatcacagcatctattgtttccgctctggcactttttatgtgggcacacgccgctacaggagtttttacagcgaaaagcgctgatgcagttagaaaaaacagcatgtttttgccgctttacaatattgtgttaattttggtcatttttcttggctttatcgcctttcttgttctgccggaagatacaaatccaagactcgcgctgctgcatttgattcaaacatcttacggcggcgtggcacaaggttttgcatatgccactatcgctcttgcttcattaataccttgttccattatggcaatcggcgcatcgaatttattcgccaacaacctataccgggatttgattcatccgaatgtgtcgcaaagcaagctgactcttgtcacacgttcaatggtgtttgttgtcatcggtctcgcgctgctgtttggaatgctgtttccgactgccttagtgacacttcagctattaggtgtatccggtatggtgcaaatcttccctgcgattgctgtcagcctgttctggaagcgtcaaacaaaagaagcgacagttatcggattattagtcggccttgcggttacgtttattgtgtataccactcaatccgcacatggcatttatgaaggattctggggattggccgccaacatgatcgctgtggtgatcctgaatccgctgttcgttaaaaacgcgggatccaatcctgtcattgaaggtttatttggcaaaaaacaagacgctaatccaaatcaaaagggtgcataaaaaaaccatacgcggcagccgcgtatggtttttttacatttcttttttcagtgtttcaattgccttttccatttgcgtatcattatcagacagcttcttttgaagttctatcattaatttcgttgttgtatcgccagtcagtatgcctgtctctttcagcttctcttttttctggaactgtttgacgacagatacaaagtcctggtcatacgtactgttaacctttaccttgtaaccaagtgctttgagcattttctgagccactttgacgtttgtgcctgtatcacctgatttgtacgttttatctgcgtccaaatacggcagcttcgcgtaatcaggcagctcagctttcacttgaggcttgatgccttttttgtgaatccattcgccgtcagcagtcagccatttggcaactgtcagtttgacagtagagccatcatcatattcttttgccgtttgcactgtacctttgccgaatgtcgtctcgccgattaacggtacgtttgacgattcatgaagggcagcggccataatttcggctgcgcttgctgtaccgtcatttactaaaacgacggtcggcttggtcactttccgttctttttcggccttcatgacttcttttgaaccgtttttgtattcaacctgcatgatgtttttccctttatcaatgaacaggttgctcatcgtaatcgcctgttccattaagccgcccgggttgcctctcaagtctaaaatatagcctttggcgccttttttctctaaactgtcaatcgcatctgtcagctctttagctgttgtttcagagaaagaagtgatttgaatttctccgatgttgttgtctttcatctctgaatagacagtctctacaggaatggtatcgcgcttaatggaaagatcgatattccccactcccgctctgttcagttcaagcttcacctttgtgccctttttgcctcggattaaagcgacggcttcatttacattcatgccttttacgctttttccatttaccttaatgatttggtccctcggtttgataccggctttttcagcaggtgaacctttaattggggatacaataaggatttctccgtctttctcctctacttgggctccgattccttcaaaagatgctgaaatcgtctcgtcgaatgatttcgcttgctcttgatccatatatgtagaatacggatcatccagtgattgaatcattcctttaattgctccgtctactaatttgtcatcatctgttttttggtaataatcacttttgatttgctcatacgctttatttaatttgtcgaacttgctgtctcctgtgcttgctgatttttggcccaggatactggaattgcccgtaataaataaagtaagcgccgaagcgacaactgcagtgatcagcacaataaaaaacagttttaattgccgtttcaattaaacaccacctttttcttcttacattattatcatggacgaattcttattcgtcaactcggagcagaaatgaaagagaaacgcccttcttttgcttttcataaacctatgtctttatacgacatatgataaggaaaaaggaggattcgatattgagccgatatttagaaatgctgtccttattcggtgtcgcaggggcgcacccaggcgggctggctttttcaaaagcggtcttgcaaaaggctgcaccctctccgaatcagccgattcttgatgccggatgcggaacagggcaaacggcggcttatttaggacatttgctgtatcctgtaacagtcgttgataaagatcctattatgcttgagaaagcgaaaaaaagatttgcgaatgaagggcttgccatccctgcataccaggcggagctggaacatctcccgttttcttctgagtccttttcctgtgtcctgtcagaatcggtcctcagtttttcacgcctgacatcctctcttcaagaaatttcaagagttttaaaacccggcgggatgctgatcggtatcgaagctgctttaaaaaaaccgatgccccctgcagaaaagaagcaaatgatggatttttacggatttacttgcttacatgaagaaagcgaatggcataaactcctaagatcctatggctttcaaaaaacagaagcgatgacacttcttccggaagacatggaatttgaaccaaccacagaaatggatttatcgcaaacgattgatcccatctattacgatacgcttcaaactcattatcagctcatgcagttatatagtgagtacatgggtcattgtatttttatcgcgtacaagtaaaacggcgtatcgccccctgttttcgtccaacctttttttcctatctatcatatgctgatagaaagtcaggataggaggggaacaatattggagagatattatcatctttgcaaaaaccatcaaggtaaagtcgtcagaattacagagagaggcgggagagttcacgtcggcagaattacccgtgtaacaagagacagagtttttatagctccgaccggcggagggccaagaggtttcggttacggatattggggcggttattggggatacggagcggcttacggtatttccctcggtttaattacaggggtcgctcttgctggtttattcttctggtaagcatagaacaaatgctagattcaccagacacaatgaagcccgcttatctagtgtaagcgggcttttcattttaaattttcttcactttttcaaagtactcttcaagcgttaaatcattatcttggatgacctttgcggcttttttgcctacatagcgcagatgccatggctcatattcatatttcgtgatatcttctttatttttcggatagcgaatgataaagccatatttataagcattgtcctgcacccatttcccgtctgccgtgcttccgaacgcttcatttagctcaaagccattgctccggctcgaaatgtccatcgcgaggcctgtttggtgctcgctttcacccgggtaagcaaccgcttcctttgccttcttttccccttttaggcttacttcattgtcaaaaatgactttctgtctgtcatacgaacggtaccctgagacagctgccagttcatagccttcctttttggcagcatcgaacattgtttttaatgcgtcggccgcttcttttctgatgtaacgtttttgaatcttttcttcaaaagaaaactctacatctggtatgacaagatcgctaggttcatagtttccgggcagtgcatattgtttattgacaagcgcgagtatattttctggattttgaatggtttccagaccatcgacttttttaatatcattgaaatactggctttccaatgaaaactcactgttttgagtgtttgattttttgctgtcagctgttttttgttctgtttgctttgtttctgctgtggttttcgtatccttttgagcatctccgttcgacatgctgcagccggctccgactattgccgttacactcagagcggcagccagtgagaaccatttaccggactttttcatattacattaccttccttttatcaatcgtttccgcattcataaagaagaggctgccggcacccagcacgcctcttgatatattttattgtgatacggaatgtaaagccacttctatcatatcatgaaatgtcgtttgacgctcttccgctgtcgtttcttctcctgttaatacgtgatcactcacggtgagaattgacagggcttttcttccgtgcttcgctgctaatgtatacaatgcagttgtttccatttcaacgccaagcacaccgtattttgcaagtttttcaatttgcgaatcgtcattgtagaactggtcagctgtaaatacgcttcctacagtcaccggcacacctttatcctttgcggcatcataggcattttttaaaagctcgaaatctgcgcaaggcgcaaaatcaacgcttccgaaagcaactctgttcatttgtgaatcagttgaggaggtcatcgccaaaatgacgtctcgcactttgacatctttacgaatagcgccgcaggaaccgactcttattagattttgcacatcgtagctttgaattaattcattcacataaattgaaatagacggaacgcccattcccgtgccttgtactgagatttttttacctttatatgtacccgtaaatccatacatgcctctgacttcattgtagcattctacattttcaagatacgtttctgcaataaattttgctctgagaggatctcccggcaaaagcacagtatccgcaatttgtcctttttcagcacctatatgtacactcatctcatatcctcctgtaaatctaaattatcatccagcccgtccattttacaacgaatgtcatgatgaaacaaacttcagcattgattataaaggaatatgtcgaaaaaagaaatgttcgaggatctgttaggcacttcctcagaaaaacggataatcggggtgttaatttgaaaacctaaccgcaggaaggaggggtaggacatgggtaaaaaacatcgtaaccggatcaccggccaaaaaaagaacaatcatatacctgaaaaagatatcattgcagctgaagaagcacacgggaaagaatattctgctgccaaacgcaagccttaaaactgcagaaaactgcgggtttccgcagttttcttttcattatgtcgtttgtacaatcagacgattgattttcctccagccggcgggaagcagttgataatatgttttcccttttctgccctcgtcaatcaggatcacgtcccctgtggccatgaatcttgcatcataatcactcggaacagtgtcgaatacattaaacaaagagaatgctcttttcagcacgtcttgatgatcgctcccgttcagttcagttcgatagacggctctgtagccctttttttcgccaaaccggggtgtctgaaatattgtcacgtcataggaacaagacttctttttaaacacggataacatcatcaagatcccctccctcttatttctttaacatattggcgtttttgctgtgttttcctctctctatttttgtcgaaaccgcttaatcttttcgtcaaaaccttttactaggaaaaacagaagcaagccgaggctaaagccgcctaacacatccgtcacaaaatgaacccccagatacactctgcttatgccgactaaaacagcaattacaccggctatgatatataccatttttttatgcttggacaaaaacgggaggtgtttcactaaaaagtaagcaataacaggatagacacaagcagcattcatggaatggccgctcggaaaactgaaggatgattcatgaaccagcggtgcaaaatcaggcctcactctttcgatccattcttttaagactttgtttaacagccgatctgtgccgaatactaagagcatcaacaggccgtcccatgtttttctgtagaaaaacatgcctgctccaatgatgacaattagagggagcagaaaagaagaagcaccaagatgcgtgatccccgtcatgacttcattaagccatggctgacggatcaaaacagctgccttgcttattgcttcatctgcagattgaacagcatttgtatgaatggccgcagctagaatgagaaagaaaagaaacaagctaacgggcttgtacaatttaaccacctcaattttcacagaagtcatagaacacgaataataaaaccggagctgaccgctccggttttaagcctcactcatcttcatccagctcttcatctatcatacatttttctatcaaataatcaaaggtaatatcagcgatttcaaacagctcatcctcactcggtatgtagccccgtcttgcaagctctctgtaaaaaaattcagcgatttcttccgtatcaatcacaagatctatttctttcatctccgtaccgcctccttttttatgttttatgaaaaaacaggctgaattatacccggtgttctaaacaattctttcagtcatatattgaataaaaaacgagccatgggaggctgacgctatgattgctaaaatgatggaagcactggacggagaaagatttgatatcataatggaaaaaacgctcaaaggaatgacgcgtgtgatgatttggggctgtctgccatattttttatatgtcttgatccgtatgttcacaaactaactgaaatgctcttttaaactttccaaaacaaacatcatcatgtctttatattcttcatcctgaaacatttcgtacagtattttgtagtcattataaatatccagaagctcatcaacaattgacacagcaaggatgtgaagggtatcttgatcttcatcatcgccttcaaactgaagaagagcagacgatgcgatatcttcgccgatctcatggccagtttctccgacataatggacaaacaacagctgatgcacaaactggtccatttcatattttctaagcaccagcgtgagatcctcttcctccgtttcaagccactctccatcctttaaacgggtcagttcataaatgatatcttcccagccatcttctaaatatctccaaatttctgttctatggccgataatgcgaaagagttcttttccataatcttttacataaacaacgtccccaataaggaattcatactcaatatcaagcttctccatgtcgacaatgacaccctcataatctttataaagctgaatagatgattcaaagtataaaacttcgttatgattgacttcataaagatagtgtttatcaatttggtgcacttttgtgatggtgccgactgttccatacataatgacgactacgatatcccctacttggaatttcggtttattttgcttcatggtgtctccccctcgccgcaacatttctcatacgctatcgtatgccgggtgaagccaattcgcatgggcatgaaaaccaaaggaaatatccaattatggtatgggggacataaaaaaatccgcagtgatctgcggatgaaacagctattatctgccgtgcacttcagactcgtattgatcccaagcttcatcaaacgtcgccatcgtgtgaaggtaatcagcattcagctccaaatatgaactgatttcatgataatcggtagatgtttttggaaagctgtgatcctcatacgcctgattggcaaattcactgatgctgtccttcggcttagggtgcctgtatttcaataaatagtgataaaaggatttcatgggtttcccctcctggtgtctgtcttttgttgttctattatacagttcaagtgtaaaattacaacaaaagaatactgaaacatgactcaggagaagtcaaaatagttgcgtttcaaaattctttctgtctccatgagctgctgatatgtcaggctttcaggcagtttttttgtttgaattaaaagcagctgatcctcaatctcctttaccgtgttttcctcttgataggtcataccgcaggaagaacataccatggcaggggtgtctgtcagttctatagcccttgttccatcagggagctcccagtacaccgtgttcctgccgggcaccgcttcaagctcgccgcaccattcgcatgttttcatgaagaatcccctccgcattcagtctctttctgttttttctgctgcgccaaaaatttcttttctttgagctgatctcttttctcacgccgattttttaatgtttcatgctccggatttgcgatgtatgcctctctccttttgattctgtctacattttcaggtgtaaacgaaacctctttgtcagcaaaaatggcactcagcccgatcggctccttttcgtcagcggtttcagggaaaacggactcaaaataggcgtctgcctgattggggatataattctctggttccggatatgacgtaatcacaccttcaaaatttcttaagatcactttgtcaggactttgtgacaggacatagtttggctgcagggcgattttaccgccgccgcctggtgcgtcaacgacaaaggtaggaaccgcatagcctgaggtatgacctctcagcccttcaatgatctccaaacctttggaaacaggagctctgaaatgcccgattccctctgacagatcacattggtaaatataataaggacggactctgatttttaccaagtcatgcatgagctttttcataattggaaccgaatcattaatacctgctaatacgacagcctgatttccgaccggcactcccgcgttcaccagcttttcacatgcctcaacggattcttctgtcatttcgatgcttgtgttaaaatgggtgttcagccagaccggatgatattttttcaatatctcgcacagatgatcggtaatgcgctgcggaaagacgacgggcgctcttgttccgattctgatgacttccagatgtggaatgctgcgcagctcttttaaaatatattctaaaatttggtcgttgatgagcagcccatcaccgcctgaaattaaacaatctcggatttcaggtgtttcccggatataagcaattgcagcatcaagctgttttttggggactcccattccgatttgtccggaaaagcgccttcttgtgcagtagcggcagtacatggaacattgattcgtgacaagaaacagcacacggtcgggatagcggtgtgtcagaccgggtaccggtgaatcttcatcctcatgaagcgggtcttccagatcgtattttgttttgtgcatttcttcagaaagcggcacagactgcatgcgtaccgggcatctcggattgtcggggtccattaaagaagcatagtaaggtgtaatatttaaggggatcgttttagtagaaattctgacgccttcctcttcatcctcagtcagattgatgactttctttaaatcatctaacgttcttacagtatgtgtcagctgccaaagccaatcgttccatttctcttccggaacgtccttccataactcgatctccttccaatgccgtttcggtttataccatttgtttttcaaacgaattcctcctcgcgcatattttgacttacagttgcttgcaccaaatattcatgttttcaaggccttcggctataaagcaattattgatcagccttccgccattttgataacctgaatggtacaacacagcattcatcccaaaagacgaagcacgggcgagagaaaatacatgaaagatatcctttccagccatttctttttctaacgcctcgattaaaaagcttgttaacgaatggccgcgatattccggcagcacagcgcaatcggttatttctgcatgcccaagctctggattgatttctgcgcttgctgagctgatcaggcggtcatgatcaagcatgatataatacaccgtatttgcattcatcgtcttttcaatataagcggggtcaaataccggtgttgggtacgtgcggaatacttttttatacagcatcgatagctggtacatgtcgtttgtttctgcttttctcatcgtaaaaacgggtgtactgtcgttgcgaagacggggcgctgtgcgatatatggcttcgatgatctcctgttcctctgtataagaatctgtttgtctccggctttctgaaaggtaacgtaccatgacacaagccgaatagccgagataatagccctttagatagccctccggcgcaaataattgtttggcaaggatcggctcatcatgctgcttcgcatagacaatgattttttctgcattctcttcttttgccgctgccaagatatccggcagggccttctcaatagctccgtcataacggaccactctgattcgtttattaaagccgtcatggtccaaaactgctgtgacaccgctactctttattgacttgagcatccgcatcctccccatctgtatgaagcccgcaccaatccatgacaaaaagtgcaataattttagcagattctatcatggcttcaacctcaatgtattcattggcctgatgagccgtttttgtttcccccggcccgaaaacgatcactggtgtatctcctgcatggtacaaaagccctccatccgttccccacggggaagcctcaataatcggctctgtctgtttcattttttgataggctgattgcagcacagaaattaaagggtgatcatcaggtaaatcattcggcagccattgagcgccaaaccattcgacttgtacgggatggcgtttaaaccattcgtcatggtattctaaatccttcagccagttttccaattcaagttttacagcttctggtttctcatggggagcaattccgcatctcccttctataacgacacggtctgcaactgaagatggccaggcaccgcccgagatcgtgccgatattcaccggtaccggtattgggatattgtcatacagcggatctgaaattctcgcattgcggactttctccagctcttgtatcgctgtgataacgtgcatgcttttttcaatcgcgcttaccccttcatagcgtgtgcccccatgtgcggctaatcccttcacagtgatccgaaaccacatcgaaccctgctgcttaataaatagtttcatattcgtcggttcaggaatcaacgccccgtcagcacgatagcctctcatgatggcggacagtgtaccggcgccgccgcactcttcatctacaacactctgaaacaatacatctcccttcaatttgacatcgcaagcgtgcagggcttctaaagcaaaaagaagggctgtattgcctcccttcatatccgttgagccgcggccgtatattttaccgttttcttcgacagcttgatacggttcatacttccaatcctttacgcttccttcaggcacaacatcgatatggccgttcaaaatcagggacctgcctccgccggctcccgtttttttagccacgatattcgggctctcatgaaaatcggatcggttagatttaaagtagggatgctgttttaattgctttatacttggctcccatacatcaatgtccatatgaaattgccgcagcttttcaagcacaacagcttgggcgttaaactctgaccccaatgtgcttttttccccaatcagccttttgagaagacgaatggctttggccgaatgctgatcaagccacccgattacttttctttcaatgtcttgcatcctcattccccctcttaagaaaaaggcatatctattttgatttcagcatctgtcagcctcgtcacctcatcgattgtcgagccattcatcagctcttttaaaatgaagtgatggctatcgacctcaagaaccgctttttcggtaataatcaaatctacacagcctgcagcagttaatggcagcgtgcatctttctgttaatttaggccttcccttttgatctgtatgactcatgacgacaaccacttttttcgctttttgggcaagctccatcgccccgcccataccaggcaccttttttcccggaacaagccaatttgccaaatctcctgattggctcacctgcagggcgcctaaaatcgtaatgtcaattttgccttttctgatcatcgcaaaagacatggttgtatcaaaataagaagccccttttacagcgcggacaggatagcccgcggcgttgcataaatgcgcatcctcttctcccttttcgggactttctccaatgccaaggacaccgttttccgcttgaaacatgacctgcatgtcaggcttcaaaaagttcggtaccaaggatgggataccgataccgagattcacaatcatgccctgcttaatttcagtagcagcccgttttgcaatctgttctctttctgctactcccaagcccatttccacttcactccctcgcttcttacaactccctcaacaaaaacccccggtgtgacaatcatttcttcagaaatctcacctatcggaacgatacgctcagcttcggcaaaggttctcctggcggccattgccataagcggattcatattgcgcgcggttttgtcatacgttagattgccgaattcatctgcaatgtaagcattgatgaaagcaaaatcagccgtcagcgcctcttcaatcaagtatcgttttcccgccactgttacgatgtcctttttttcgcaaaccatttgattatcaatgcccacgtcggttaaaataccgccaagccccgctccgccggcgcgaatccgttccgcaagcgttccctgaggtgaaaattgaacctctaacgtcccctctgtcatctgttttccggctacaggattggaaccgatatgcgaggcgatcagggttttgacccgttgattaacaataagcgggccgatccctatatccgggaaaccggcgtcattgcagatcacagttaaatccgttacaccgctgtccaatatcgcttcaatcaatgaaggaggcgacccgactcccccaaaaccgccaaacatcagaaccgatccatcccgaacatctgcaattgctgtgtcaatgctgattgctttttgaaatgacgccatttaatgtcaatccttttttaagtttttttcgaccgctgcaactgtttctgaaaaaatagagataagctcttccatttcaccgtctgaaatggtaaaaggaggagcaataatgacagcatctccttctccactgtctattccagctttggaaggataaacaatcagcccgcgttttttcgcctcgctgacaataatctgagttatcgtctgctcttgcggaaacactttcttcgttttttggtctgccacaaattcaacgcctaatagcagtccttttccgcgcacatcacctataatgccgctttgagatgccgcctcatcaagctttttcttcagcacagcgccctttttttctgattgtttgatcaagccgtgctttaacacatatcgcaaaacttcaagagcagctttggctgaatagggatgtgcactatatgtgtgaccgctcataatcacacctgacccttgttttatcgtttcaataatagaatcagatacgacggcagcagcaataggcgcataaccggcaccgagtcccttccccagtacagcaatatcaggtacggtgtcccaatgctctgtcgcgagcatccttcctgttctcccaagccccgtcatcacttcatctgcaataaaaagcacatcgtgtgtgcggcatacctcacttaatctctcataatatcccggaggcggagtaatcgctgctcctgcagcaccaataataggctcagccacaaagccggcgatgaattggcttccgattcttttgatcatagtgtccagttcatcagctgcagtctgaacaaagtcttcttctgtctcgtgattcagccgataaatatgtggagctgagatagctggataccgttcaatgagatgggtgaaccggtatctcctttcataaaaaccagataatgaaagcgctcccaaagttattccgtggtaactgctccatcgagacaaaaagatggatttttgtgtttgctttttttcctgccaatactgaatggcgattttcatagctgtttctatcgcttctgatccgctgttgacaaaaaaagaccaattcacatctccgggcagctcctgtgccaagagcgcggctaattgctcggcgggctcactcgtaaactgtgagcggtaagcaaaagacacctgatcaagctgttctttcagcttctcagtcacatcacgaactccgtggccgatattacatgtcaccgctcctgacgagccgtcgagatatttttttccggtctgatcataaacatatgaacccttcgcataactgacaaccggataggccgagctaagctctggcttaatcaaataactgctcatgctcccacctcaaaaccccttttaccatattgtatgagtgtccaaatggcggcatgacgttccccgcaaaaactttttcacataaaaagagccttcctaatagggaaggctcttttggaatttcagcatctagcaaataaaagcggctccaacaataattaataaaatgaacaagacaacaattaacacaaatgtatttgtcccgcagccaaatccgtaaccgtacccagagtatccatacatgctgttttcatcctttcttatcacgatatacggcattttatgcgggccaagtcccaaatggtttgtgcaaacgcctatttcatgtaaggaaataatgaaatacagtatgcacccgctcatattttttaaacgtcagcttttcgtaaaactgagttgcaccgtcagtgcttgcagcaactaagtaggctgcttccattcctagtgatttggcgatggacagcatttctttcactaagatactgccgtagcccttcctttgaaactgatctaaaattgccacttcttcgattttagccgttttctcttgatgatcgataaacagctcgccgcacccaatgggaactttctgtgcctggtcgctgtaacaaacaacaagaatgattatacctgcttcatagaaaggatattttctttttaatttttgttcagcgattgcttctccaatataaatggaatcgtaaattttcataatagaagatccgtcgctaagacttttcgccgtcccccatgcggttaaaggatgtcccatctgccccttccagtcactaagcttcatgtcatatagtagctcatcctcgacgacaaaaccgctttttacaagcgactgcttcaaaccgagcggaaaaacatgctgcggcgacgcttttaaatggagataattcgcatcaagcagctttggtacggagggtaaaaagttaagtaaccgctccaatggaaacgtatcatggagctgaacaaagttatgagaaaaaatttgcggaagctgcggatctctgtatacgctgtaatgatcaaacgatgccgattcagacgttaacaatatatattgatgttccgtttttgaataatgtcctgtcatgaacgtctcctttttatgacctatacctttactctgttgcaatattcaatttctttataatctcatcgtacaccggataaaacggctttccaattggaaattgctgaatatttcggaaagaagcggagattggcttctgatgtaaaaaaaacttccttgttacttgttcactaatcgggtgaaagacgccgtttagaaacaaaaacggctcgcgttcgatgaaaaacagacgtcggccaggcggatttttgatcaattcagatcgtttccacgtaatcggcggcccttccggaagcgcctccatttcttcttttccaattgtcactatgtcttttctttgaaattgataaaattgaaacgcatactggtccacaattcgccttttttttccggcttcgatataaaatattgcaggatggtcagcttcctttactaaaatataattcggaatgtttaaaattttgccaatcctatattggaataaatatgggtctggaacagcgacagtccgatttagatacaaaaaaccccacttttctccaacaggatgccttacaccctgatcaaaaaaatacacattttgatctgaaccttttacaaaagagccgtcaatcaaatcggcgggcagaaaccgatatgcattttgaaatgaatctggggttttataggttgtgtctaatacttcatttatcggcagaaatggggtaaagttgttgagtctcgcccaaaaaattgcgtcgccatgattccaatgcttcatatcatcatcccagtagcctccaaatttatgatggatgagattaagtaacgaacggcgatgcataactgagcaatgatcaacttgaaaagcggcctgatcaagcactgcattggcatttctgtagaaatgtgagatttcctctcccctttcgtttacatgtacaactttttgttttgaatagaccgcctgcgcttcaggcttatgtgaaaactcttgcaccatacggctcagccgctcaggatgataaacagtgtcgtcagtaagataggaaatgtaatcgccgtctgcaaatgggagcgcactgttaattaatgtggcataacgggctgtttttaatcgatctgcaggatgcacgaaactgttatgatattgaatgcgccggtcatggagatacttgtgaatcaccgcagttgtttctgcattcgaatgatcatccatgataaaaagctcccaaagatcatgcgtttgctgtatcacgctttcgatcgctttttgcaaataatcgggtttgttgtaacttgttaaaataatagacactttctctcccatctataccgcctcccaccgtcaaacataaaaacggctccgcagcaagcagagcctctgtcatcatttaaaaagcaccccagcttacaacacttgagagtgaaacatgagctctcgtgttatttaacgggttttggaaaataaccaaatcagtcagaacttcttttacgatgacattttgaagtgtatctccgttgatcaaattgacttttgaaaccggtacgcccagctcttttgcaaaaacaagctggcgtctgaggtcagatggatttccttcagaagacgattgacgtatcagcagaatcagcaaaagcaaaataaaatgcagatcatcttggttttcttctcgatccacttgtttctctaaatccaaatcatccctctcccttatccttatctctgtttcacaatatgtgcgacttcgatttatggtataggctatgtccactccattaaaaaatcagcattttccttaaatagatgaaaaatagatcaggtacggcgttcgactcataccaaataacagccggaagaatatgaataacgtgagttcactatcgaataggaggtgtgtgtaatgagctctgaaaatgcacagttaaaaaaggatttaattaaagccgttttaagccctttatttccaactgcaacagaaggaggagaaaatatggatagtaatcttaaagccttgcttgatgctgccatcgatcaaaaagtagatgaaagtgaaacggttacggcagaatctattttagacccttctcttccggcaagatggatttttgccagaattacgccaggcacgacaatcagcattgtgactgattcaggtgacatgatcggaccggttgttttcgttgctttcgatcaggttcacgggatcgtatttgtaacacaggaaagctccgtcactccggcaggccaagctacaacattaattgatgtagacaaagtagaaagcgttacgttcttttcataacatccgatgaaagtcttgtatatccagtcgggatacggaggaatatacagttattttgatcgctgggctgaagaatgttttcagaacactcatacagagtatatgattgcagataaacctgaagcagaatctttgatgaagatcgaagcgtttcagccggacttcacacttatgatggttggagaccgcgttcctcacgactggctgacctggttaaagggtaaggatatccccgtgtatgtttggctgaccgaagacccattttatatggatatcagccttcaggtaattaagcttgctgacgccatattaacgatagaacaaaatgcagctctctactatcaagagctcggctaccagaacgtctattatgttccgataccagttaaccatcggctgtttaaaaaaatgggcaccgaacattcctatcattcaaatctgttaatcatcggctatccttaccctaatcgggttcagcttacgaaagaagcggtccatctgccattcacggttcgggtaatcggcaaggaatggggaaaatatctgcctaaaaaagtgctcaaacagccgcatattgatgtcgtcagcacatgggttccacccgaacaggccgttcattattataatggggcagacatcgtaattaatgcgcatcgtccctatcattttgctttcaaccaaaatactatgcgcatcaaaaatgccagttttaataaccgaacgtttgatatcgctgcatgcgaagcatttcaattaacagatttacccgcggcgcatcctttttcatcctttatttcttatcacggcatgaacgactttaaggaaaaagccgctttctatatcaaccaccctgaagaacggcaaaaagctgcagcagccaattataaagagatcgtacccgcatttacgtttgatgagcttcctgcaaaactaaaagcgattcatctggcgctctcatgaaaaatcgttcattgctatgaacgatttttttattcatagaaaaaagcagctgcacaagctgctttctattctagccgtcagaacggtctttcagcttcctcggatttacctgtttatgaagatcaggcatttcgccgagatgctgtgcaatttgttcccacgatacaattttgaaattttgattgacggcttgtccgttatcgatattttcgccgtcctgcgccacaaaaatcccgtacggatattttgggccaagtccgaaaccgagaacatcaataccatccgtgtcactagtaccgtctatcttctcgccatctgtaatctcaaagttggctacatagcgatttttcccctgccgttcatacattgcatagctgttatttccttgacttgaagccatgagatatcctttgccatttggtgcataatagattgtcagtccttcaatatcagctgtcaaatgatctcctgtcgcacggtcaacaacctgcccctttgaccctccgccgggctcagcgttaaatttccagatggcttcatcttcctctgctatgtataggttcccatactcatcatccgcaacaaggccttcggtctgagaattcaacttaaattcacgcacctttttccctgttacataaccctttccaccatcaacaatttcatactgctcaaattccccttgtttgcctgtcactaatgcgtaaaatgctcctgttttctggctgtgatacaagctgaatccataaacctcagaaatattggtggaaataggatggttcggatctgtaatgcttttcaattttcctttatccccgtctattgcatatacttcaattgtattttttccttcggaccggttggatgcggcagcaatatcaattttttcgccgttcaatggaaaatcatagcgcagatcgacattattgagcttgccaaactcataagaatgaagctgttttccgtctaaatcatacacaacgagccctgacttcttatttgttgtaatcaacttgcttttttccgggtgtttttcatgaacccaaatggccgggtcatctgctgcatcatcgccagatgcgaccggatctgtctccgtgtgtgcagtcactttgaaatgatgttcctcattcacataatgagccgacaccgaggttgctgtcaggctaagcaataaacccgcggcagtgcttagcagcattgtttttgaaaccttcatttggtaccctcctcttttatcactaacactactattgtaaaatatatacaggtgattaccgtgaggaaaatgaacctttttttatagggtttctgactcataaacaacttattccccaaagaggtggtgagatgactttgccagatttacttttgcggagcgaaataaaaatatgttgaatatttagtacattgtttatttagttttgttttttcctagttacgtccgtttttccattttctattaaaaaagaacactttgtgacatgatcattcccctaaattttgttttattggttgctttcattaattcgattacaaagttgaacatatgatgcatggtagagaaacgagagttggaggataagccatgcctaaacagcaaacagcagaactaaaaccatttttccataacaaaacagttttagtcactggcggaacgggttcaatcgggagtcaaattgtcaaacgccttttgctgcttacacctaaacaggtgattgtattcagcaaagacgacagtaaacagtatgtcatgagccaaaagtatgcggaggataagcggctattatttgtacttggagatgtacgcgatcacagaagggtgaatcaggtgatgaaaggcgtcgatatcgtctttcacgcggctgcgctgaaacaggttccgacatgtgaggaccatccatttgaagcgatccagaccaatctcatcggcggacaaaatgtggtggaagctgccctttcacaccgagtgcagcatgtcattaatatcagtacagataaagctgtatctcctgtgaacacaatgggtgccaccaagctgttatctgaaaagctgtttcatcaagcaaaccgccacgtccaaaacaaaggaaccttgttttgttcggtccgctttggaaatgttctcggttccagaggttcggtcatccccatattatttgaacagatgatggagggtgaacccctgaccatcacagacaaaaacatgaccagatttttcatgtcaatagacgatgcagctacattgacattacaatcggctgctattacaaaaggcggagaaacctttattttcaaaatggaatcactgaaacttgaagaactgattcatgggtttgaagaatatgcatcgcagcacgggctcccgcggccggctgcagtagaagtgggcaagcgtccaggtgaaaagcttcacgaagaattaacatctccacatgaaattgaatcactgtatgaatggggcaacctttatgcgatccttccagagccggaaaaacatcctgactttcgcaaagtcaatctgcctgggtatcaatcagatcaagccccgctcattacgaaagaaagaattgctcagattattgaagaattgcatcaagagaaaaaggcataaaaacaagcctgtctatccattaggcaggcctgtttttaacactttatttattaaagagatgcagatagctttcgtatccttcttcttttagcttatgcttcggaacaaaccgcagcgctgctgaatttatgcagtaacgaagtccgtttggaccaggtccgtcattaaatacgtggccaagatgagaatcagcagttcggcttcttacttctgtgcgaatcatgccgtggctcgtgtccagtttttcttccacttcttcttcttcaatcggctttgtaaagcttggccagccgcagtgggaatcaaatttatccttggatgtaaacaatggcttgcctgacacaatgtctacatacaacccttcttccttatgatcccaatattcattttgaaatggcggctccgtgccgttattttgcgttacttcatattgcatgcgatttaatgactttattttttcttctttattgtacgccatttatttagccccccaatgctcgctgataaatcccgctcgtccggaacctgtccggtagcgctgataatgtgctggattctttttataaaaatgctgatggtagccttccgcttcatagaaaggttcagcttttaaaatgtccgttacaatcggatctttaaagatgccgctttccgccagacgttgcttggaagcttccgcaagctccttttgtttatcattatgataaaaaatggctgcgcgataggaactgccgcgatcagcaaactgccccccggcatctgtcggatcgatttgctgccaaaataattcaagcagtttttcataagggaatacatcaggattaaacgtgatttgaacggcttcacgatgtcccgtcgtttcactgcacacctcttcgtacgtagggttttcagtatggccgcctgtatacccggacaccactttttcaattcccggctgttcgtcaaaaggtttaaccatacaccaaaaacagcctcctgcaaatgtggcgatttcttttttttcagacatactggtgcctcctttgttaatacgtggtattattatattatagcatgtaaaaatagaatgaaaatgattctgcttttcaataaaatctataggttttaagcaatatgcttatgtaatggaggttcacaaatttgaaagtaagaacacagatgatgtacgatatggaaactttactccgtaaagtctttaaacaaatacgcaatgaaatcaatgaaattttagataaagagctgtcgcggaatgaattcaccattcttcgaatccttagtgaacaagggcctaaaaaagtcactgaatttgcgcctattttagaggtatcggcaagccacattacggctgtgaccgatgcgctggtagaaaaggaatggattacgagaatcagatcgaaggaagacagacgcatcatccgcattcatatcactgaagcaggcgaaaaagtccttcagcactttaacgagaaaaaaacggaatatttctttaaacgctttgactgctacactgatgctgaacttgccacgttaatcgagctcttcagcaaacttgataaaaaacggtgaaaaaaagcacataccgatatataggtatgtgcttttcgcagtgcttcacttatttttcagtaaacagcttcattgctttccagcggccatatctataatacaaaaatgccgcgcagctgctaaataaaaaactcattccgattccaagcccgattcctttttgtccaagccaagctgaaaatagagctgtgaaaggatatctcaacacccaaaacgagattaaatttaataccagaacctgcagcatcgctcccgcggccctgacgattccgttcagcacaaaattaatcccaataaaagggtagaaaaacgcgatccacttcaaatattgttcaccaaatgcgaccgcatcaggctcactgataaataaccttatgagatatttaccaaatacccaaatcataaccgcaatcaccagcatgcaggaaataacagctatcacacccagccttgcaattgttcccactcttttttcgtttccgattccaatattttgccctgccatactattgacggccgtaccggcagccattgctggaagcgtgatgatgctatcaagccgctgcaccgcgccaaatcctgataccacgtgatccccgtatgagttaacaacactcataatcgccatcataccgcctgtaatcaccatcatctgcagacctgccggaatcccgagtttcaaaatcagcgcggactcttcccacttgggcattctcggaatcgagaatggcacaagcttgtgtttgatgacataaaacaacccatacaaaaacgcaatgccctgtgacaaaatcgttgaataagccgctcccgctattcccatgcggaacacagaaataaagagcggagcaagcactgtattcagtacaacagcaaacgcaataaaccggagaggtgtcttgctgtcgcccagcgcacgaagcacagtactgataaagttataaccaaacaaaaataaaatgccgataaattgaatctgtaaatacgtctcagcaagcggtatcattgactccggcgtttttagaagacgcagcaaaagctctgagagaaaaaaaccggccgcgccgaatccgatgcttaggcctgttaataaaacaacaaaagcgttaatatacgacgccattccttttacatcatcttttcctttttgctgagataaaatggttaaagtcgcattgttaaggcccaaaataaaagacagcacggtcaaaacaatcgtgcttgataccgcggctgccccaagggcctttgcccccagtaaattgccgatccacaagctgtctataaattgaaaggaaacctgcaatgcgtttccaagcataataggcattgaaaacagtacaagctgtttcagcacgttcccctgtgtaaaatcgtatgctttcatcttttctccttgtgttctcaaattttcttcggaccgcacgaaaaaagagacgttgtttcatgtctcttttttcatgacttatcggttttttttcggtctcgcataccgaatgtaaacaccatcacacttaggaacaaggcacaataggaaacattcaaatacatttgatccatgtcttcagcagccagatgatgataagcaagccagccgaagtacagggaaaatgtaaaggataataaactgaaatactggtaaatctttttcattttcagtcacctctattgtttaggatggtaataggaaaactcaatttcatctttttctaaatttatcttatccgctttgacatacattccattcgttaaaggcatttctgacaaacgcacttcaatgcttttatctccggggtgaacatggacaaatgacggcaattcataaaagctgtccatataatttaacacaaagctaattggtatactcaatttccctaacgaaaatttcgtgacattcagctctacatcaccgttttttttcacggtcggctcaaaagcgataaacgcatcaatagacgtggaaaatgccttgattttccctgcgacatgaacatcatcatcaatctctactttataatcaagcttatttgatgctttgtcgtttaaatatgagttaacaaacgcagctaatgattcttttgtgcttgtcacttgaaatccatactcgctctcagatgaatccttcacctgagcctgttcccccgggagcaaaacaagtgccacaaaaccggcggcgaggataaaattaattgcaagcaatataaaaaacagtcgcttccacttattcatgctgtcaccctactctttcggtaatccttcttttttaatggcttgatagacgcgctttgcgataagagaataacccgtaccattaggatgaaaatcatcttcctcagaaattcggctgctgtcccttttttgattgaacaaatcttcgatatgaacgatttttgcatgtttatcttttttcagctctttttcagcaatatggttccaatccgtgacgacaccatttatttcatttagttctgataatgtaaacgtaaacggattgtacatactgacataaatcagctcagcgtgatcattcagctcgcgaatttcagaaatgattttttcaaagcgcttttcgtacggtttttccgcttcctgaaacggttcaacggttaattgcagaaagttttggcgaaggattttcatcaaatcattaccgccaattgtaaaaaagacataatctgcgtcctttatgcctttttgaacctttttatcttttagtttttctaataaatcatccgaacggttcccttttacagcataatttttcacgtcgaccgttttgacttgtttatctgaccggatagaatccgccaccttgccgacatatccctttccttcgggatctccgactccttctgtcagcgaatctccgacagccgctatgacaatgtgttcttttgttttcgtttcatgggctttttgttttccctcagatgatgtacgtatgctcgtacacgcagtaagaagcaaaatcaaactggccatgattgaaaaaatgcgcagcttcaatcttgttgctccttcccattctactagtggaaagtgtatcatgttttagaagatttgcaaatgcctagtctcttagcttacttgagtgtactggctgactttacatcggaaatgatatcatcgtacggtgtattctccactccattgtaatctttcagcaccttaccgtccggacctaccaaataaaaagaagattgatgaatcacttggtcctctccctccggcttctttacgatcgctttaaagctcttaagtgcgaactcctcaatctcactctggctgtatccagtgagaaaatcccagttatcaaaagataatggataatttgcggcaaatttcttcagctgtttcggcttatcgttttctgggtcaacactaaatgatatgatgcggacatctatattttcggctttcaattttttttgcagatcggtcatatgagcggtcattggcggacatacagtttcacaattggtaaaaataaaatccgccagccatacttttccttttaagctctctaaagaaacgttcttgccgtcttggttttgaaatgtaaaaggctccacctcgtaattgagcggatttttaatctgctgtcctccgcatgcacacaaaaacagaaaaatcagcccagccgttaaccccttgataaccttcatgacatccatcctttccagccagcataaaaacgctttctaaaaccgtccttactgtcccatgtttgtattcgatactgagcaaaaaaaatcctgcatgcctccccattaacgattacaaaggagggcatgcaggtaaaaaacggcatgttacgcgttgtgctttaacacctcttgatgaaatacagcctgataatctgcccacttcatccggcgcttcatataatgtcggaaagaatacacttttgccctgctatttgatgaaaacacttcttttaagtagaattgcaaatggtgatgtaacataaagaaatagtgctcatcttcctttaatacaggtatttctgtcactttcacctgaatcccgtcaccgcgtttgaactctaggcttttgagtaacaagctatcaatcctcttttttgtttttcttctattatatatgatgccagccgggctgtctgtcattttgcgcggttgtgtaaaaaaattagattagcaaatggaacaagtcctcatccttgttcacctctacataatgaaacggttttttgttcatccgttcaatcagcggcccataatcggctttgttctgcagctcgatgccgacaagagcaggtccgttgcttttattatttttcttcgtatattcaaaccttgtaatgtcatcattcggcccgaggacttcgtcaagaaattcgcggagcgctcccgctctttgcggaaagttgacgataaaataatgttgaagaccttcaaaaatcaaggaacgctccttcatttcctgcattcttccgatatcgttattgcccccgcttaccacacacaccacgtttttccctttaatttcatccttgtacaaatcaagcgctgcgacagaaagagctccagccggttcagcaacaaccgcacattcgttatataattcaagaatggatgtacatacttttccttcaggcacgaggagaatgtcatcaacgacagtttccagcgtccggaaggtttcctcgccaatttttttaacagccgcaccatctacaaacttatcaattttatcaagtgtgacgacatgcccagctttgtttgattcaaagtaggatgccgctcccgccggctcaacagcaattacctttgtatcaggagacacgtttttcaaatatgtacctaccccagagagaaggccgccgcctccgacacttgcaaaaagaaaatgcggttctgtatcaatgtcgtttaaaatctcgactgcgagcgttccctgtccggccatcacatccggatcatcgaatggatggataaacgtccgagattccgcctcacagcattcagcagcgcttttatacgcgtcgtcaaacgtatcgcctgtcaaaataatatcgataaatccttttccgaatagttcaacttgagatactttttgtctcggtgtagtagacggcataaaaattttcccgtgaatgccaagatgtttacacgaaaatgccacaccttgagcgtggtttccggcacttgcacacacaactccgttctctgtctgctcgctggaaagctgtttcattttatgataagcccctctgagcttaaaagatctgacaacttgcaagtcttcgcgttttaaatagatattgcattcatatctctcagaaagtctgtcattcctctgcaaaggtgtgtgaatgacaacgtcctttacgttttggtgagccttcaaaatgtctttcacttggatgagagagttttctttaagcaacggtttcatgtacagattcctttcttgttttaaatccctatttaatatgccattataacatgaatattcaaaaaataagacaattatttttatttaataattaaaaaaatacagactatgtccaccacatcttgtggtaacttctgttcaaccattatcctgcagagccaagaaaaaagatgatcgtaaaataaagggtgttttcaaccaaaaggcatgatataatgaaaccaattagaaccaaaaggagccaattgatgaatagtgcaccaaaactcaatacatttcaacatctaatcggagaacatcaaactttcctggaagcgaagcgaatcgccaagcagttctcgttatcggagcttcctgtcttaataacaggaaaaatcggaacaggcaaaaatcacttcgcacatgccatacacttggaatcttcgagaagcaatgaaccgtttataagcgtcaattgcagcacccattcggaagaaacccttattcatgagctttttggccctaacggaaacacaggtgtttttcaaaaagcggtacgaggaaccctttttcttgatgatgtatggcgcatgcctgcttctgtacaagctcagctgttaaaagcgcttgattcagacacggagaaaccgcgaatgatctgtgcttctgcagaccgatctgtggaacatacattcaggcaagacttattctacagactgaacattttaacgctcacactgcccgaattatcggaacgaaaaagcgatattccgcttttgacacagcattttctctcaaattccggtcagcaattgttaatcgatccctccgtttttcccgtgcttgagaaacatgcatttgaaggcaatgtcagggaattaaaaaacgctgcagattatatggcggcagtatcaagcggaggaacgatccagccatatgacctgccgccatatattagaggcgcgatagacggaaaaacgtcgaagaaaaaagcgaagctgctgactttaatggaaaaagctgagtttttgtttattttggaaacaataaaagtattgaacgaaaaaggagaacctgccagcagacggatcatttctgaacacagcaaaaatacccaaacctcgttaactcctcagcaggtcagaagccgtctcgactatttggagaaaaaagattatgtcaccaaaagccgcggacgcgcaggcacaaaaattacctttgagggcttgagctttatagagacgttaaaaaatcaaatgatctagcgatcgaaaggagaatgcacttgtttacaatcaaagaagagatcgccaatgcgattacacacggcatcggtgtcctcttatccatcccagcattagtgtttctaatcatatttgcggctaattacgggtctgcatgggacattgtcagctttacaatattcggtgtctctatgctgctgttatatttgagctccaccctgcttcacagcatcacacataaaaaaacgaaggacattttggagattattgatcatagcgcgatttacgtactcatcgccggaacctacacgccttttttgcttgggccgctgaaaggcacactcggctttaccctgttggttatcgtatggtcacttgccctaggcggaatcgtttttaaaattttctttgtgaaacggtttatcctattgtcaaccttcgtgtatttagtcatggggtggctgatgattattgcaggtaaacctttatatgcttcactgagcggagcgggtttcagcctcctttttctcggcggcattttatactctgtcggaaccatcttttacatttggaaaaagatccccttccaccacgccatttggcacagctttgtattgggcgggagcgctgctatgtttttctgcgtgctcttctattgtgtaaaggtgccgttcctttcgtaacagtaacagaaaagcgcagtcttcacgactgcgcttttttttatgcacgtaattgtttttcattggcaggtatataagcttttgaaaaggacaattcaatgtctgccggttttaagcgtttaaaaaacgagcccttttgcatgttatctgttcctttcgtttccaccatcaccaacggaagatgatagcgggccgcaagttctacaggatcaatagaaccatctagtgaaagaatcaggctttgtcccttttccagctgttttgtcacatcttcatataccttttctgaatccccgtctgaaatcacatccatccgatccagccattgcccgataaaaggcaagcggaacacttttgggttggcgataaagccggccggttcctcaatatatccagcaattaaggccagttcagccaaacgcaaacggggatgcacatacaaaacaggaccgtgtggtattggctctggctgatggatcgtcacaactgaaccggagatgccgatacagccttccaaaaacgcctttggctgttcgtacacaagagtcatctgttttttgtatgacagacggggatcgagcattgtttgattaaataattgtttcatattttttaacagcatatacacaatataaaccactagaaggctgtagcgaaccaattaaaatcctcccgctttagaagaattctttttttcatacattagaaattcgtaatcatacgggtttttttcgtctttggtcccctgctcagaagaaaccaacttccaattggattcatcaaattcagggaagtgacggtcaccctcaaactcgtgatgaattttcgtcatatacagtctgtccgcataagggaaaaggtccgtatagagctgagcccctccgatcacaaagcattcttcagggcctgaacaaatgtccagtacatcctttaatgaaccgacaaccgtgcatcccggaaattctgaagccggcgctgaggtaacgacaatatttttccgatttggaagcggacgtccgatcgattcaaatgtttttcggcccataatgattgaatggcccgatgttactttcttaaagtatgcaagatcattgggcaaatgccacggcaaatcattgtctttgccgataagcctgttggcatccatcgcaaaaatgaatgaaatcatacgcttaccgccccttttatatgaggatgcggatcataatcctcgatgataaagtcctcaaatgcaaagttaaaaatagaatcaacctttctggcgaaacgaagctgcggaagcggtctaacatctctttcaagctgcaaattgacttgttcaatatgattttgatagatatgaacatcaccaaatgtatggatgaactcgcccgattcaagcccagtcacatgagcaatcatcatggttagcagggcataagatgcaatattaaacggcacacctaagaaaacatcggcagagcgctgatacaactgacaggacagcttgccgtcagacacatagaattggaacaggcaatggcacggcggcaacgccattttatcaatttcaccaacattccaggcgctgacgattaagcgtctggagttcggatttgtcttaatatcttcaataagacgggaaatttgatcaatggtttctccatcagctccccgccaagaacgccattgggagccatatacaggtccaagttcaccgttttcatcagcccactcattccagattcgcactccgttttcctgcagatagcgtacattcgtatctccttttaagaaccacagcagttcatgcgcaattgatttaaagtggagttttttagtggtgagcatcggaaagccttcccgtaaattaaatctcatttgatatccgaaagtgctgattgttccggtccctgtccggtcttcctttttctcaccatgctctaaaacatgtctgcataaatccttatactgtttcatttttttcatcctttaaaagtagtcttctagtagtgtaacacaataaaaaatcatttctgaacccagaaatgatttttttatagtcagctgacaacaggcttttcatcctgttctttttcttcatcttgcagatcctgatgcgtatgtgcaattctgctcgccgctgctgcagcaagagctgccacaatatcatccaaaaaggtgtgaataccgtctggactttcatcaagttccttaataattccaatcttctctttatccaaataaccgaaattggtcaaaccgatcgacccgtacacattaacgattgaaagcggaataatttcatctatgccgtaaagcggttcatctgtttcaacaaggtgctgcagcggctcggggagaagcttctgttctgcaagctgatcgagtgcaaggcctgtcaaaacagcatgaataatttcacgtttgttcaggactttttctacattctccatgcaaacactgagcggcagatttggattgtatttttcctgaagtttttgaacaatccgtgcaatatcttctatcataacgccccgtttgttcagcatatcctttgttatatcgaccatttcattcattgtgtactttttcatgtctaatggcatctcctttaggcactcatccagttgggaggcgtgttgcggtcccaataaatgctcccaagctcatgatgtgattgaaatccatcttctgctgtatgataatgaaaattaaaccagtagccgtcatgaggcgggtggtctcttcgcacatggaatctgagaagatcttctccagttgtccgattgtaaacgttgaaaattttttccgttttgcccgctgaaggcatgcttgagatcacaacatcttggtacgcctcatcatcttgcaatgtcgctaaataatcactaatcacattttcgatttttggcaggatctctttccgatagtcatcctcaatgacaggagcgattctgctgccgaattttaaaaaggactgatcctcagcgctgtcaaggagctgttccttgtacgattgaaaaagcagttcaggattttgcctgtcatccgactcatcatcgtacaggtcatgctcatcataaaaagcggtgtaatcattctgctcaagactgctcggctgtccggaaggcttgtccgccataagggcagccggaggagatacgagcccgaacgttacaatggtaaataaaaccacaagggtctttctcatccacaatttcatgactgcttattcctctctattttattgtcatgtttctcttattttagcacatccaaaacatgcaagtcatgtactatatgaaactgatatgcaaattaggagattcgttgctatgcactttgtgtaaaaacgcttacaatattccatgaaaggaggctttccgcatgattgacgctctgtttgccacagtttcactcttaacattattatactttgtcgtcatggaggtcaccgattaacagaaagcccgtgatatgaatcacgggcttgtttgaatgacgccataatggaacagtgctgtttttcttttcatgacgttaaaaccaaactgttcaaaccgcggacttttccagtggtcttttagcacaacgctttttctggcgactcgtaccgcttcattgatacatccttcgtgtaaaactgaatcctctgccaaatcacgtaaaggcgcgatgccgtcagaggtctctacaggttcatgaaacattggatcgaaataaaccacatcaacagagttgtcaggaagctgtttgatgtattctaagcaatcaccattcttcacctggattcttctcatcgcagcttgaagctcttctatacccgtttcccatgaatgcagccccgtcctcactaaaacagacacaagatggtttttttcaatcccaacaacagaacccgtttcgcctactgccatacttgcgataatggcatctgaccccagcccgagtgtgcaatctaaaaacgtatccccttcagataatccggcagcccgaagcataggctcttgctctccctgtaagaagcgtttggctctaaacatcgctgtattcggatgaaaaaagaatttggcaccttgtttcgtatacagctcaaaccgctctttgccgaccacaagcaaatcacgttcagctgacctcagcaggtgttcaaccgtttgtttattccggccgcagtatggcatatttagctctttagaaagctgctttgcggtttttatggtgtgttcagacggtctatagcttgttgttatcatcttctatactcccaaaaagaaaatgcccggaaaacgggcatttagcagtgcgcatcgaaggcagcagtcagatttttcatgatttcttccatatcgtgtccttcaatttcatgacgcggaataaaatgtacgacttctttgcctttcaaaagagccattgatggtgaagaaggctcctggccagtaaaatactcacgcattttcgcagtagcttctttatcttggcccgcaaaaacagtcaccgtattgtcaggtgttttgtcattctggaggactgcctgtgtagccgcaggacgcgcaaggcctgccgcgcagccgcatacagagttaacgactacaagagttgtgccctctgccttttccataaagttttctacttcttctgctgttgttaactcttcaaaacctgctccagtcagctcgcggcgcatcggtaagacaagctggcgcatgtattcttcataagccattgacataaaaaaagccccctctagtatccttcatctgaagtaaaggatactatagagagggccggatttcaaatgttcacgccttaaaatatagaagtaagtgtccccagctgtctagattttcataataccgccggtgttggcacttgtcacaagtttagaataacgtgccaggtagccggttttcactttcggttcaaaacctttccagttcgcttttcgtttttcccactcttcttctggcacttgtacatccaagatacgtttttcaatatcaacgataatatggtctccgttttcaacaaaggcaagtggcccgccctcagcggcctcaggtgatacgtggccgattgagaggccacgggaggctccggaaaaacgtccgtccgtaatcaatgccacttttggtccgagtcccattccaacgatttgggatgttggcgccagcatttccggcatgccaggtccgccttttggcccttcgtatctgataatgacaacgtcgccttcttttacttttcggttgataatgccgtcaagcgcctcgtcctgagaatcgaatacgacagccggcccttcgtgtcttgtaatcccattctgtacgccgcctgttttaatgatagcgccgtccggagctagattaccgaataaaacagcaaggcctcccttttcagtgaatggttgatccagcgggtgaatgacgtcataatcctttacttcatgtccggcaatggtttctccaagagtttttcctgtaacagtcagcgcgtctaaatgaagcgctccttctttcttggaaagctcattcagagccgctgacacgccgcccgcttcatgaagatcttcaataaacacatccgatgcaggcgccagcttggccaagtgcggcacgcgctcagcgacttcgttaatgcgttctaaagagtattcaacgccggcttcgtttgcaagggcaagggtatgaagaacggtatttgtagaacctccgagcgccatatcgagtgcaaacgcgttatcaatcgcttttactgtaacgatatcacgcggtttgatatctttgcgaatcgtttccattaattgcgcagccgattttcttacaaactctttgcgttccggagatgtcgccagaatggttccattacccggcaaagcaagaccaagtgcttctgacagacagttcattgagttcgccgtaaacatgcctgagcaagatccgcacgttgggcatccgaactgctctagttcttgaagctcgttttcgttgattttccctgcttggtaggcgcctaccccttcgaatactgaggaaagggagatttttcgcccgtcacttgttcttcctgccgccatcggtccaccgctgacaaaaatcgtcggaatgttgatgcgcattgccgccataagcattcccggtgtgattttgtcgcagttcggaatacagaccattccgtcaaaccagtgtgcggatacaaccgtttccacagagtctgcgataatttcacggcttggcagcgaatatctcataccgatatgccccattgcgatgccatcatctaccccaatggtattaaattcaaacggcacgccccctgcttctctgattgcttcttttacgattttcccaaactcctgcaagtgaacatgaccgggaacgatatcaatgtatgaattacacaccgcaataaacggcttgccgaaatcctcttcttttactcctgctgcacgaagcaaactgcggtgcggagctctatcgattccttgtgtgatcatattactgcgtaattctgccatggtgatcctcctaaattctttcaattgtttgattggattttattttgaaaattttcagtttatttatgagctgtttttgcaaataagataaattcaggccgccctcaccttgttttgttctttcgtgtttttatatttatatagcttttctttcgatttgaaccctccaactattaatattgttacttactataaatagttttcggatatttttcaacaatattcgaaataatttttataaaaagtgaattcacataaaaaaggtgcatgatctgcaccttttttatttctattcgcctttttttctgctttccgtcatttgtttccaaacagaaccttttgcttcttctccatgctcaatacgttcaagcgccattttgacttgaaggctgacctcaaattcggggtcatcttcggcagcgcgcaaagcttcaattgcactatcatccccgacttcgtacaggaacatggccgcacgccagcgaacaagcttgctggagtcgcttaacgacttgatcatagcgggaatggcttgaggatcgccgatatcagacaggcagtctccggccgttcttctgactgatacagctttgtcctcaagtgctttatacaatagaggcagaacatcaggtgtttcaatcattcctaagtacacaacagcctgtcttctgatggacacctttggatcatccaatgccttctgtaaaaccgggatatcctcttctttcggatccatctgttccaagtgtgcataacgctttttccagtcctcatcatccagcatgtcaagcgttactttatacgctttgcgctgtacagcttgttttgcttcgccctttccttgagcggctgcttcagtcagtcgtttcagccgttcatcactgtatgccgcctgaagctcttctgtcacgtcatggccgatttcattaaagtcaccgaacctgacaccttgttctttccaagcccgctcaaacacaacatttgaagcttcagatctaagttttaagatcgcctgctgaaagcgttcaggtaagccgaagcgttcttcccgctccccatcggttaatttaacttgcataggaatgccgctgaacatctgcacaaaaacttttacctctccaaaagattcttgatcagaacgattttcttctgcgctttcagcactttccatcccaaatgcagtgcggacttgcggtaaaatgtctttccagtcgtatcttgcattccgttcaacagcaagaaaatctgcgacgtgatatacccctttaactccatctattttaaggatttccgctataacaggcggtgcgccttctgcttgctcaggtttatagttattgcttttgcccgccggaagctcttccgttaagatgactttcattgtattcgggcttggtgtaggttcaattgattttatcttcatgatcgtcctcctatagcatatctgtgacttattctatcatagtcgctccaagccttctattacgacgttttggcatcaatcccggatatttctttttctaattggcggacaaactgaagcataaaattgtgtctttcttctgccagttcccgtgcagtgtctgtattcatcatatctttcagccgcagcagcttatgaaaaaaatgagcgtaggcgctttgatcatctccataaaggctatgcccgtttgcgcccgcaaacatgaaagctctcgcaatgccgacagcaccaatcgcatcaagtctgtcagcatcctgtacggcttttccctcaattgagagcggctccttcgccagcttttccctgtctcgaaaggacatccttgttataatatgaatcaccctgtcagcattctcttttcctactccgaaaaaaacgagctggtcatatacttcgttcacagaaagcctgaccgtgtcaggcagcttcacatcaattaaatcatgaaccaaagccgcggtttcaacaatgaacaaatccgctttttccttttctccaatatacgctgcaagatctgctactcttgatacatgatgccagtcatgtccagagctttcgtcagtcaggatagattgaacccatgtcctgatttgctctgcctgcttcaattccttcacaaaaacaccctctttattgctctaatagcttcacgatagcgtcttccagctctttcggatttgtatttggtgaataacggccaacgatttctccatttctatccactataaatttcgtgaaattccacttgatcgccttagttcccagcatccctttcgcatgttctgtcaaatacacaaacagcgggtgggcatttttcccgtttacatccacttttgaaaacataggaaatgtaacaccgtaatttgtttcacaaaattcctgtatgtcagcctcttcaccaggctcttggttcatgaattgattgcaggggaaccctaagatctccagcccctcctgctgatatgtatcatataattcctgcagctgctttaattggggagtaaaaccgcacttacttgctgtattcacgatcatcagtacctttcccgcgaaaggctgaagtgtcatgtctttccctgttattgtacgtacctttatttgataaatagacatgtaagtccctcctatgtccttggtgctgattattttaccttttttaaatcgcaattcaaaatgtaaacatcatttaagaactcataagtaatttgacgatatgagcgtccgttcattatcaattcatatggctcattttttatcttatcattctataaaacattacaattccctctgacatcatggaaaatcattttactgtgaaaccaaaaggcgtgtcagtgcgttttatttaaagagttttctgttgtttcccctcaacacgcatagatagattgaaaattggcgtgaaaattcctataatgaagaaaattaaacggggaaataatggaggtggcacgttgcctattaatataccaacacacctgccggcaaaacaggtgcttgaaagtgaacatatatttgtaatggatgaaagcagagcatttcatcaggatatccggccgcaaaaaattattatattaaatttgatgccgaaaaaaatccaaacagagactcagcttctcagattgcttggaaattcgcctttacaggttcatttcacatttttaatcccaagcacacacacgccgaaaaatactgcgagagaacaccttgacgaattttacacgactttttccaatatccgtcacaagaggtttgacggcatgattatcaccggtgcgccgatcgagcatttggcgtttgaagaggtttcatattgggaagagctcaaggaaatcatggagtggagcaaaacaaatgtcacttcaaccttgcatatttgctggggtgctcaagcaggtttgtactaccattacggtgttgaaaaaattcaaatgccgaaaaaaatcttcggtgtgttcgaacataccgttctttcaaaacacgaaagattggtaagaggttttgacgagctatactacgtgccgcattcccggcatacagatataaatatggaacagcttcaagcagtgcccgatttaaacattcttaccgcatcaaaggaagccggggtttgcttaattgtgtcaaaagacgaaaaacaagtctttttgacagggcaccctgaatatgatacaaatacgcttcttcaagagtatgaaagagatttggaacgaaacctttctactgtcgaggagcctaaacattattttgcaaaaggcagcaacgagccagtgaatcgctggaaagcgcatgccacattattgtttatgaattggctgaattattacgtttaccaagaaactccttatgaatgggactaatttttctttttttagtgatacgctgagcaaaaaatatgataaaatacatctgattcagtctgcgtataacaaaaatttaaaatactggaatccaaatcatttaaaattagcttaactttttcactgcattaataattcgattatgtatttgtgttatgtttatgtatagacaataactccttacgatgcatgaagcttgcttgttgttgattacattgaggtgaatttacttgaataccaataaaagagtattaattttgactgcaaattacggaaatggacatgtgcaggtagccaaaacactttatgaacaatgtgtacggctcggctttcagcatgtaacagtttctaatttgtaccaagagtcaaatccgattgtttcagaggtaactcaatacctttatttaaaaagcttctcaatcgggaaacagttttatcgtttgttttattacggagttgacaaaatctataataaacgtaaattcaatatttactttaaaatgggtaataaaagattgggcgaacttgtcgatgaacatcagcccgatattattattaatacatttccgatgatcgtcgtgccggaatacagacgccgaactggaagagtcattcctaccttcaacgttatgactgatttttgtcttcataaaatttgggttcacgaaaacgtggataaatattatgtggcaacagattacgtgaaggaaaaactgctggagatcggcactcatccaagcaatgtaaaaatcacaggaattccaatcaggccgcaatttgaagaatccatgccggttggcccgatatataaaaagtacaatctttcaccaaacaaaaaagtgcttctgatcatggcaggtgctcacggtgtattaaagaacgtaaaagagctgtgcgaaaaccttgtcaaggatgaccaagtgcaagtggttgtcgtgtgcgggaaaaatacggctttaaaagaatctttgagtgcgcttgaggcggaaaatggtgacaaattaaaagttctgggctatgtggagcgcattgatgagctatttcggatcacagattgcatgattaccaagcccggcggcattactttgacagaagccacagccattggagtgcctgtcattctgtacaaacccgtgcctggccaggaaaaagaaaatgcaaacttctttgaagaccgcggagctgccatcgttgtgaaccgtcatgaagagattctcgaatcagtcacttcccttcttgcagatgaagataccttgcatcgcatgaagaaaaacattaaggaccttcatttagcaaactcctctgaagtgattttagaggatatcctgaaggaatcagaaatgatgactgccaaacaaaaagccaaagtgctatcgtaatggcgtacttgagagcatacgaaaatcgtgtgctctttttatttatattcagccatcaataaaagcggttacatttttttatggaacttgcccttcttttgaaaaataagccgtttcgcaacttgacgggtgctcccagatggtgtatagttgaaccatcatttaacaatgaatcaaagttaaatgatgacaaaattttttttagcacatgggtgctacagtactaggaggaattaagcaatatgcaaaacggtaaagtaaaatggttcaacaacgaaaaaggattcggcttcattgaagttgaaggcggagacgatgtatttgttcacttcacagctatcgaaggagaaggatacaaatcattagaagaaggacaagaagtttcttttgaaattgtcgaaggtaatcgtggacctcaagcttctaatgttgtaaaactctaaactcaatacatgatgatgagatgacaaatagaggagaggcattcgcctctcctatttgattttcatctggatttcaatcgccaaaatgttttgtttgcacctctgttcaatctcttcaacatacttttccattgacggttttccttttttcgcgatatccgccagttcttctaaatcactgtatatttctataaatgttttgtgaaggatcaacttcaagtctttatcatccatagctgcgttccccttctctatcaagatacctcaaatagtaaaacagtcctatttattctggttcaatagttatatcggcttatttttattttcttttctattttggtacataaatttcaaaaaaactctgcaaaataatggcggaggtgtttttggtgacttcagaatttcataaagaggatcagactggctttacggataagcggcagctggaactagcggtggaaacagcgcagaaaacaacaggagctgcgacgagaggccaaagcaaaacattagttgactctgcataccaagccattgaggatgctagagaactgtcacaatctgaagagctggcagctctcgatgatcctgaatttgtaaagcagcaacagcagctgctagatgacagcgagcatcagctggatgaattcaaagaataaaaaccgcagcttctgcggtttttatttttagtgattggttaagacatctccgtattgtttcagcttttcaccaaccgtacatttattgatacaaaatgaatgcgcataagttttgccaaattctttgcgaaactgcttcttaataaaacagtccttgcaatattcatcgtgcagttctgtcagttctttaaagatcattttcttatccaatatcgtcatctccgttacggtctaatttcgtgtggctttctacgaattgatgggatagaatttttttagcgaggccgtcagcttcctgattgtcttttcgttgtattgtttcgtaggttggagtaagcttcagcgattcaaggagtgcttctattttgtcgagccattcattatgagatggatcataacaaggccagctgccgtcaagctgattcagcacaacaagcgagtcccctttgattgtaattgaatttctgcttgccccaagctctcttacttctcttattgcttcataaagcgctgcgtattcagcttcattattggttttcagccggaagcttttattttttctcaaacgatgccggattcctcccaatgaataatagatgacgatcccgagaccggccagttcgctctccttatcgaaactgccgtcaaaataaacagtaatgtcatcaggctcttgagcaagctcctctgtcagcttttccaattccttcagcgtccagctgccgcctttctcgtcttcgaactctagctctttcatgtatggaaaacggccaagttctctggcgagcatacgtgcctgctgtgctgtcagccagtcttcgctaaaaaatgagacggatcccgttccttttgcttctattttcaaatgcggtctgagcttcattacaatcaccttaccattcattagttgccgggcttatgctataatcaaaccaatcttaccccggaaaggaagctttttcatcttgtttaataattcgttttggatcttttttgcgatcattcattttatcattgttcttttattttataaaggatttggcaaaatgggactgtttgtttggatcggttttgcgacagtctgcgccaacctccaagtcgtcaaaacagttgaactgtttggcttaacagcgacactcgggaatgtgatgtatggcacaatcttttttgcgacagatgtgctgaatgaaaaatacggaccagctgaagccagaaaagcggtatggctcggattctcaacgctcctgacgctgacatttgtcatgcagggtgtgctgcttttcgaaccggcttccagcgacatatcacaaacagcgctggaaacgatcttcggattccttccgcgagttgcgttaggaagtctgcttgcctttatcttcagccaaacgctggatgtttatgtatattcggcaattagaaggatatttccttctgatcggcttttatggctcagaaacggcggcagtacagcagtcagccagctgtttgatacattcatattcactgcagtcgcctttctcggcatttatccggcaggcgtgtggcttcatatttttatttctacatatttgattaagtttgcggtatctttgatttcattgccttatgcttatgcagccaaaaaaatgatacctaaagatgaaaggagttcataatgcctacagaaatatacgtagacggcgcaagcgctggtaatcccgggccttcgggtattggcatttttatcaaacatgagggaacagcagaatccttctctattccaatcggagtgcatacaaatcaggaagcggaatttcttgcattaattgaagggatgaagctatgtgcaacgcgcgggtatcaatcggtttcctttcgaaccgattcagatattgtggaacgcgccactgagcttgaaatggttaaaaataaaacgtttcaaccgttcgtagaagaaatcacccgattaaaagcggcattccctctttttttcatcaaatggataccgggcaagcaaaaccaaaaagccgatcttctggcaaaagaagcgattcggctgaatgaaaagaattaaatcttgatcattggttcatcctaatggcgaggtgaactaacatgaaaaagaaagataaaggccggctgaccggcggtgttactccgcaaggcgacctggaaggcaatacacataatgaccctaaaacagagcttgaggagagagcaaaaaaaagcaatacaaaacgctagagaggatctaaacgatctctctagcgttcagcttttcaagcatacgctcaattcctttgatttggtggcggcgaagcatgtcagccgcctgctccatttgcaaagtaaataaagcgtctttcagtgtgcaggccagcggcactgagcaatgaatttccgcaagcttcctcgacatctccaaatcgcttaaaccttgctgaatttttccctgctgtccttttggaagaagagaaagattttccaataaacggtcaatcgtttcgtattcacgaatcagtttgtaggctgttttttctccaatccctttgactccgggatagttatcactggaatctcccataagcgctttaatatcaatcaaagccttcggcattacgcctgtttcttcataaaaagtctcttttgtatagactttataatttccgattcctttttgaagcaaagcaacgcttactttatccgttaacagctgaagtaaatctctgtcccctgttacgaccgtaatgtccgcttcattcgcaaataaatcggcaagagtaccgatacagtcatccgcttcatagccggcaaagccaatattcatgattccaagctctgcggctgcttcctttgccaaatcaaactgcggaatcagctccacaggcggcgcgctgcggttggccttataatcttggaacaagtcatttcggtacgttttgctccccatgtcccagcagcagacgacgtgtgtcggctggaatgtttccacagctgtaatcaaatgctttaaaaagccgttgacgccgttcgtcggcaccccgctgtcatttatcataaagttgcgatgtacggctgtggcaaaaaaggcccggaataaaagagccatgccgtcaaccagcaatagtttattattattcatcaaataactcccttttctttcattccttctattttatcataaagcagcccaaaaataaaaaacagtatctctttaattagagatactgtttggatatttatcaatcgttgtgtcttttgttgctggcgatcagcttttcagcttcgcgtcctgcgtaagagtcaaaatgggtttgaaatccgtttttctttttggcattgttattcgcctgtgcatttctgtttccgagctttgttctgcccaacatgaatccccccttacgtcggatgcatatagtatatgcttccggcaggaggttcactcgcgacaggatcatccagcttacatgcggcttacgtattctctgaccatttcttttgatacaagccgtcttgtcgggacgatgccttttttagcgagctgattcatttgctcggtaatttcattaattgcatctgtagtataaggctcatcgtttctgcatttagcaacagcttcttcaatcgccaattcacgcatattttcaagacgcataaatgctttgatatgctcgtgctgttttgatgaatgtgctgaaattgctttatgtacctctgacattaatcgttcatctcgcttttttctatttagtctatcatgacttgaaatacaagccaactgaattttacatttttattgtattgtctgaatttttccaggagatgcacgcctggtacgctatttcaatctctttcgcatgttccccttccgcatatcctcttaaatatgtctctttttgatccgttatttgcgcgattgctttttcacccatatcttcctgtaagcgtctgaggtgagctgtgtaatgagagatcaggctttcttcttcattttttatccatgcctctgtgattttcgtaagtttcatccgtacagcttcgataaaggccgattttcctttctgctcaaaaaactgcttcggtgatttgacctcttttagttcctgctcaaaagcacgttcttctatttccggttcaacttccttcaactgtatgccgttcgaatgctgatcacccgcataaacggaaaaataaccgtcctcgtttaatgttttttgaaattgatccagccattcttcattgatatgccgttcgatgaaaccgctcatgcgaacatcaagcgttttgatttcctgaatatattcaaattgatattcatgtaaggctgttgtcatcgccttactgacgttctttttccaatccccgttttgcagcccgggatgaaatgccgattttaataaatcatttgcaaaatatgataatcgctgtgtaatgtgatatagctgctctcttgtatctttttttactttttcaatgatggtttctgagttccgccgtttctcgatatcggccgctgtccgctcaaatgacagcataaggcgctgtttctgcgcttccttctcttctcgggactgatgctgggattggtgaagctgaaaaacagtttcgcatagtttgtctgcctccgaactgagctgcgctgctgacgctttttttacatccacttcgataaaccggtctaagtgttttcttactttcgggaactgattataaaatgactccggttttcccaccagttcctccttacttgatacggtaaagagctgcggctcataaaccccttcttttacaagctctgcgctgacataatcggtcactgtttcgagttctgttttatcttttgcaaggtctgcagcattaataataaaaaacattttatccatgctgagcgattctttcacaagtccaagctttcgcaaaaatgaacggtctccttttgaaaaagagtgctgataataagtcatataaaaaaatgcatcggcatctttgatatattggaatgccagttctgtatgccgtttattcatgctgctcgcgccgggtgtatcaacgatcgtaatccctttttcagtgagcgggcatgtataatagaccgttacctcttttacagcacaggccgttgtttcctctgctacatacggctttaattcagatagcggaatcgttaatttcttctgttcctgtatatactgctgatacttctcgtatgcaagcaggaaattgctgatcaatttcacgtgttcttcctgcagcctgttttttttgactgccttttcccacttctctgtgaaggaacggcctgccggttcctttggtattccggtgagctgcaaaatttcagccgttatgtcatcctctgtcttaaacactacatccgctgttttgtttaagttgccattgattggcattgtgatcttgttaattgtcgctgtggttggcgttggtgaggatggcagcactctttcgccgacaagcgcattggcaaatgatgatttccccgagctgaagcctccaaaaagagcgagtgtaaatttccgttcctcaagccttttcaccctttcacgaaacgctgaagtttgctttaacaacatgctgcattcgcttaaaaggtcagacaaagtgtaaaagcgtttgatttggtcttgaagcggcatttcttgttccattttgatttctgatttcggcatcggctgcgccgtcagctggcttcggccttgtttctgctctggagccgccactcttgttttcttcgatttaaaccattctgtgtctatatgcatggggcatgcggactcttcttcccaaatggcccacaggcgatcggttttctctcgggcattattctctaaacgcgcctgttcttgaagaaagacaagtttttctgattcttggacgagcctgtctttaattgtttgcacatctttggaaacacgctctttcaccatagcggagagcacctttatgatgtctgcggcttctcttttcgcctctttccggatgagctctgccaagtcttttgtatattgcaatacatattcagaggaaaaggctgcaccatgcttgaccgcgcgttcaatgatgcttatatcaagcggtgtgcgataggcctgaatcagcttttcactttcagcggtatagacatcaaataccttggcgagtttatgaagcgtgtctatcatatgccaatccgcttcgggctctgttcgttttgccacatcagagaaaaaagcattccgccttttatctctttcctgtgcagttttcgctttagaaaagaaaaagccggttttaaaggaaggctcttgtgattctaaaaatgcagccgccaattcacgcatttcaaaaggcgtcaggtttgcgttttttaaaatacgattgatttcttcctgcatcctcgtctctgcctcagtcgtttgtttttcggcctcattcaattgatcacgcagcgattggaccagtccaatttggatattaagctgttcagcgaaactcggagcgcctgtttcgtctttcttcagcatttccgtatgttcctttagcagattacggactttttgttcggttaaagcctgcatattgctttttgattgctgttctattcttcttaactcttctctcaggacccccatctgattgaacgggtggtccggttctgttactgacgtaaaatagagcgcttcctttgaaatcccttcattgcaaagcatctcctctacctgcgctttatagtctccaaatttcgtctccgtctcatcatggcggtcaatttgattgacgataaaatacacattcggaatgctttcttttattgatctgagaaactttacattttcctcagcgtgcacgtgattatagtgaacgacgtaaaacagcgcatccgcttggtgaagaatagaagcagccgatagaaaatgagcatcatctgttgaatctatccctggagtatcaatatacgcaaccccggaatcgatctcagtatacctgtcaaaaatttcgacgctttcaatctgttccccgtctttacaatattgctgcaccttgtctttctggtaagccccttccagctcagcacacgctccgtctgttgtatgaagccgaactcgcttttccccgtttctgatcacaacaaggttagcgcttgtcggaatcgggcttgtcggcaaaatattctccattaacaggcagttcagcagtgacgattttcccgctgaataatgcccggtaaacgcgatataaacctcttcatcagccgcttttttcatgaccgcagccagtttagcagccctttgttcatcttgattctcaataaattgcttataaatttccccagttttatgcaaaagctcttttctgttttgatctgtcataagtctgaacccctttgtgccgtttcaattgtgaacctttttcgaaagatctgaattcattcccttttcattttacacaagaataaaccaaatttctttaggagaatagaaaaaagccgccattacggcagcttctataaaagaaaatctgcaacttttacaagttccagattcatcaaacagatttattagagattccttttaatacaaaaccaattaatacactatatgtacaaaccgctccaagcaaaaacagcattgtcatttgcttcaccatcctgattgagaatctttttcaaattcattttaacatagttgagaatgattttcaatcgctattttatgctgtattcctgtaatgctttgtcttctgcgcgaattctgacgcttaacaacacggcattgaaaatggaaaacagacacatggtgacgtatgcttgataaagcagcggaatcagcaaaatttcgagtataacaacggcatagtttggatgtttcatccatttatatggacctttttttacaagctctacacctggaacaacaaggattttcgtattccaatatgcccctaaggaacaaagcgcccaataccgtacgatctgtacgcttaaaatcactgcagcgataccgagccaccagctggacggctgtttattcatcagcagcacttcggcaattaaggacaggaaaaaaaggatatgcatcgtaatgatatatggatagtggctctcgccaaattcaattgctccttgcttctttaccttttgttcgttttgcctggccactgccatttctgctgctctttgaacaatgagaatggcgatcatcaaccaaaacatgagtcaagcccccttttcccagctgaataatagcaactctgatgagaagcccggccctaatgcgccaatcagtcctcgttcatcttcctttttatgtccgttctgcagatggtctttgatcacatacaagattgtggctgaagacatatttccgtgcttttgcaaaatgctttgcgcagatgaaagcttttctgacgacagcccgagacttttgatgtatgcatcgatcactttttttccgcctggatgcgccaaaaaaacactgatatcatggaatgacagcttatgtttgtccaaaaaaatctgtacatttgttttgagccatttttccaccaaggtcggaatgtctcgtgagaaaatgactttgaatccttgatcggtaaagtcccagcccatgacatcttctgattgtttcatcaaaacagattgggcgtccattatcttcggcgcaagcttcagctttgacatcctgcggtccgccttctctccgcataataaagctgcggcaatgccgtcaccaaaaagcgaggtgccgatcagattgcttttcgttttatcttccggctggaatgtcaggctgcacagctcggcagcaatgacaagcacaaaagcctcaggatacgctttgcagtattcggctgcacgcgcaagtccgctggctcctcctgcacagccaagcccccaaatcggaatccgcttcgtatatggagaaaacggaagttcattcataagccgcgcctcgatactcggtgtggaaagacctgtactggagacgaaaaaaacagcttccactttctcataaggaatggcttcttgaaaaaattccggatgagagaggcactcacgaacagccgctctgctgtgtttaagtgtttcttctatgtatatttgatttttttcttcaaagctgtgcccctctttataccattcaatcggcttaacaaactgtctcgaatggatttgcccgtttttaaaggaggataacagccggtcaatatccttaaaagaatgctgaaacatatagcgggcgaactcggccgctttctcttggtttacattatacgcaggaagacttgttccaatggataaaataaacgccatgcgatcacctctttgcatacattgtgccgcaacaatcttttttatatgcaaaaaaactccgccgcggcggagttagactgctgttttttgttcagcgaggtcagcttcttgttctatttttttagctttagaaaaaaagttatatacaatatttaagacgactgcagtaaagctgcccgccacaatgccattcgttgtaagcagcgttaaggcactcggaagctgtttgaaaatatccggcacaacggtcacaccgagccccaatcccactgagcaggcaacaatcagcagattttcctgtttcgcaaaatcaatgcggctgagcattttaatcccgtaagcgatcaccattccaaacatcgccaccattgcaccgcccaaaacagcggatggaataatggtcgtaaaagcagcgatctttggaaacagcccaaatgccattaggatcacacctgtgaccacaatgacggcattttttttgatccctgtgagctgaacaagcccgacattttgagagaatgccgtataaggaaaagcgttaaaaataccgcccagaagcacagccagtccttcagctcgatagcctttagacaaatctttctctgtcaaacggcggtttgtcaggtcacctaaagcaaagtaaacaccagttgactccacaaggctgacaattgcaacgatggacatcgtaatgataggcgctgcatgaaaagacggcgcgccgaagtaaaatggctgaatcatttgaacaactgccgcgtccgaaacattatcaaattgaacttttcccataaaatatgcgatgaaggtaccaatcaaaataccgatcaaaatcgagacggacttgataaagccttttgtaaaacggtatagaagcacaatgatactcaacacggtaaaagcaagcgcaaggttggagagatctccgaaatctgcacttccttctccgccggccatgttattcatggcaaccggcatcagtgtaataccgataatcgtaacaacagagcctgtcacgaccggcggaaaaaacgatacgagctttccaaagaaaaatgaaataagaatgacaagaatgcctgaagcgataatgctgccgtaaactgttgaaaccccatattcagatccaatcgctatcatcggcgatacagctgtaaaggtacagccaagcactaccggaagcccgatcccaaaaaatcggttgctccacacttgcagaagtgtagccacaccgcacataaaaatatcaattgatactaaataagtcagctgctcgacggtcagtcccattgcttttccgacaatcagaggaacaacaatggcgccggcatacatggcaagaacatgctgaatccctaaagacagcgttttgccgaatccacttctcatgaatgaacctcctgtacgaaggacacttttccttcttctaaagactgaattcttgccaaagattccactcgatagcccagtttcacaagttcatctcttcccggctgaaatgacttttcaataacaatgccaattcccgcaatagaagctcccgcttgcttcacaatcgacacaagcccgtgcgctgcctgtccatttgccaaaaaatcatcgataatcagcacatgatcctgatccgacagatgggtcccagacactgcgatttggctttctgtttgcttcgtaaaggaataaacagacgctgtcagcaagttgtcggtgagtgttaacgattgatgctttctcgcgaagacaactggcacacccagcttcaagcccgtcattacagcgggagcgatacctgatgattcgattgtcacaattttggtaataccgtcttttgcaaacctggacgcaaattcgtcaccaattctctgcataagcagcggatcaatttggtgattcaaaaaagaatccactttcaatacctgatcagataatacgatgccttcttcctctattttccgtttcagtgcttccatcctgtctacctccgttatgagaataaaaaaagcattgcccgctcaaataaagagcaagcaatgctgatatcacaaaaaaccgtacacgtgcggttccattgctcacccatagtcggacatttacggtgcccggtagaaacttgcgtgccatatccacgcgaatatatgagtgttcctattatattgtaataaattatatcaagattctaatctcttgcataggctgaaaataaaaattcccgaactttaattttgtttttttagatatcattcgtatttcaaggggattcgatataaaagagcctgacgacgcgccgccaggcttttgattatgacagatagagatttgaatatttgtttgataaataatcaattaaatagcgaacattcagctcttctcctgttgcatctttaataatgtctaacggctttttccgttttccgtgaatgtgcaccttttccgtcagccattgctttatcggatggaactctcctctttccaagagagcgtcaaattcagggagatcctcaagcattttttgtttcagctgagccgcatacatgtagccgagcgcataggatgggaagtagccgaaatctccacctgcccaatggacgtcctgtaaaatcccctctgcgtcggtctgcggtgtaatccctaaataatcctggtatttttgattccaaagcgacggcagatcttccacagacacttcattgctaaaaatcgctttttcaatttcataacggatgatgatatgaagaggatacgttaattcatccgcttcgaccctgataaatgaaggttttgattcattgattgcccggacaaaatcatccagggagatgtccttgaactgttcaggtgatgcttcttgaatcttctgatagtacggtgtccaaaaatgcttgttgcggccgataaaattctcgtaaaataatgattgcgattcatgaattcccattgatgcgccgtctgacaagttcgtgccactgagtgcttcatcaatattttgctcgtatatcgcgtgcccgcactcatgaatggtgccaaagatcgccgtccggaaatctttttcatcatatctcgtcgtgacccgaacgtctccccggttcagcgtagttgcaaacggatgaacggtttcatcaagtcttccgccatcaaaatcgtagccaagctcctgtaaaaaatacagactgagctctttttgcttttctttcgggaacgcttttgtaagaaagcttgtatctggtttatttccggaagctgtcacctgtttaacaagagggataatcgcttccttcagctcagcaaacagctgatcaagcacctttaccgtgacgccgggctcaaacaaatcaagcaatgcatcataaggatgctcttgatatccccaatacgtaataaaacgtttattgaattcaatcagctgttctaaataaggagaaaacaagctgaaatcagattttcctttcgcttcctcccacgctgtttctgcctttgaacacagaattacgtattctttgtattcagcctcagggattttcttattctcttcatactcttttttcgccagttccactgcttttttcgtatcttccgacaagtcatcaaatcgttcatacaggacatcgataagctccttcattcgatctgatgtttggatattgaatatatctgttgaaagctggccgatgctttcggcacgatcctctgagccgtttttcggcgcgcctgttctggagtcccagtgcattaacgcaactgcttcgctgtaatgtgagattctttttaaaagatcaaaaaattctttttcatatgtatgtatctccatatccattccctccctattctagccgttccattacaggctaatggaagggggtatgaaagtcaaattgtttgtataaaaggctgccggtatgttttgcggcagcctttttattcagttgatcgtcatttgattttttggcggaggtgttcttcgctttttctgcttgatttttttatccacccacactgttgccagcggggttaagagcgaggtgacaataacgcttgtcgctataattgcagttgccgactcagcaactggcgcaaatgaggcattcgcttccgctaatgcgtatggcacggctacagccgcccctgccgtagaagaagcggccacacccgcgacaccgtctccccgcgcgacaaaacgatcaagtaaaaacaaggaactgcccgataaaatgacgacagaaactccgataaaaatgccgagcagccctgattggatcagcattccaaaattcaaggtattgccgagcgaaaaggcgaaaaatggaatgatcgccggcacaaccttgctgaataagtctctgagatcgtgatccagatttccaagtatacatccaagtaaaaacgggataactgtcgctgccagcgtttcccatgggaatgcggcaagtcccgtcacaccaaacgtcaccatggtcataaaaggaccagattctgtactgataaaggcgaaagcgcccgcatcctcttttcttcccatgtgattcatgagcgccaaatacagtccgccgttcgtttcattcattaccgcgacaattgctaaaacagaaaggcctgcaaaaaagccggattgtatgccttcgtcaggtataaattgcgctgcgatcacgccgagcagtgccgcaaatccgacctttcccaataataacgtgattccttttcttgcgatatagcctgaagaacgaaaatcaatcgttgctcctacgcaaaagataaaaacacccagtattggcagcgttccggtaatcaaagcacccgtaaaccctccaaagaactccgctgttccaggcgcaaacgtgttgagcgccgctccaagaaatagcggaataatcatcattcccccaggtacccgttcaattgtcgccttgattttcatattgtggattctcccatcctccggttatgaaaaaacaatttcacttacacttggaaaacagcctgcaaatcctcttttgaacagctgcccagctggctgccgactccgacggcgccagctccggctctaagccaatccggcacttcagacggatgtatcccgcctgtcggaataaaggtcacctgcgggaaaggacccgctaaatttttcataaacgggatgccaaacacaccgcttgggaacagctttaatgtcgtaaaaccgaatgtcagcgcttccataatttcgctcggagtcaagacgccggggatataatgtgtctttacaaaagatagatgttcagcaagatcagctgaaaaacccggactgacaataaactgcgcgccagcctcagcagcttccccagcttgctgcgcggtgatgaccgtgcccgcgccaattaaaatatcttccctattacggaaggattcgataatatctgatgccccgggggtcgtatacgtcacttcaactgcacgaatccctttatctaacaaactctcaatctgctgacaggcctcctgcgtatcctttgaacgaatgactgcaatcagctttgcttctttcagacggttttcaacgactttggactccatattaataatcccctttcttttggtgaaccgttctttgagcagataaaaaagaagctaatttctccctggtcggcaaaccgtccatatcccccggtgcctgcacttgcaaagcgccaatcgcatttcccctttgcaccgcatccttgtacgacaaaccgtctaggataccgctgattacaccgactgcaaatccgtctccggcgccgaccgtatcaaccacccggtcgacccggcagccttctagaaatccttcacttgtccccgttttaaagtaagcgccttcttttccaagtttaatagcaacaaagctggcaccttttttcaaataatagtcggcaatgccttcaggtgttttttctccggtcaatagctctccctctgcgatacccgggaaaaaccagtctgcaagcccagccagatcattgattgtgtgtaccattgttgcttgatcaggccaaagcgaaggtcttacattagggtcgaatgaaatggtcttccctgcgtttctcatgtcgttcatgacatgatacgtgaagtctttcatctcggctgacaaggcaggcggaatgcctgtcacatgcaaatggcctgcgcattgaaaataatctctcggatattcagctgaagttaatgtgcttgcagctgagtttttcctatagtaggtaacttgcgggtcgccttctttcacttttgacttcagcagcagcccggtgggattttcgtcctgcgagcggatcacgcgggacacatccactccctcttttttaagttcctgtacaataaacgttccgagctgatcattgccgaccttgctcatccatcccattcgaaacccgagtctggcaaggccgcaggcgacattgctttctgctccggcaagccctttagaaaaagtggatacttcatgaaggcctccatactcatttgcataaaacatggccattgattccccgaatgtcaccgcatcaagcttcatctcttcccaacctcctcttagttgagggcacctaggattaaagtgactttctcatgatgacttttgcctctaattcaatggtttgaggcgctcctttgtcaccttcaatcctttttaatacacgttccatcgccgtcctgcccatatcatgtgacggctgggcgatcgttgtaatacctggaccgatcagtttataccattccgtatcatcgaatcctgcaatccctatatcttgagggatgcgcaggccaagctcttccatacagctgatgattttcagcataatcaagccattcaaagccagaatcgcttttttttgctccggcatttccttgtgaaaagaacgaagcgccgccttaagctgctccttgtcctttacgtcaatttcaagcaatctgacaagcccgttcacattatgaaccgaagccattttctgatacacagctgctctttctgcacgagggctgatagaggaaatcggttcggtaaacagcgcgacatcagtataccctttgctgtacaccttctgaagaatctcttttgtgatccatctgttgtcagtcgttacggtatccagtttcagatccggcagtttccggtcaattaagattgttggaatttgctgttcagcaaaagcgcgcagtacatccttgttttcccctgttgcgtttaaaatcaagccctcaaccgaatgggcttctagctttaagagcatttcccgctctttttcaggactgttatctgtgttgcacaccataatgctgtatccatattgatcacaaacctcttcgactcccctgaaagcagcgaccgaaaaaggatttgtaatgtcagctacaacaaatccgattaacttgcttttttttattttcaaaccttgcgccattttactcggccgataattcaattctgcaattgcctttttaatgtttttcactttttcaggagaaatcgcgtcaatttttccgttaatatagcgggaaactgtcgatttcgaaactcctgcacattcagctacatctttgatggttgtatggcctgttgttttctttttcattcaagtgctcctgtatctcttatatttgaaaccgatttcaaaaccgttacaacaaaagaataccataattttaaaatttgggaagagtttttttaataatgtgtcaattcattattttttcgttgactcttttcactatttatcctaaaattttctttgaaaccgttaccaaaatattttcattcaagtgatgctgaaatcctaaccaagggggaaatataatggaaaatcgttattctgtacatcctgaacaagtaaaacgctttacaacagaggagcttcgcagtcatttcttaatggatcctttatttacagaaaacaaacttacgatgtattactcacatgaagaccgggttgtcatcggcggagcggctccagggcaaagtgaactgaagcttgatgcaggtgattttctaaaaacagacttctttttggaacggcgtgaaatcgggattattaatgtcggccagcctggtgccgttagagtcggcgatgatgaatatgtgcttcaaacaaaggattttctctatatcggaatggataatcaggatgtatcattttcaagcctgaacggggaaaaagcgaagttttacttcgtctccgcttgcgcccacaaaagctatccgacacaaaaagccgccctagctgaactgacaccggaccgccttggtgatgatgcagcgtctaatgtcagaagtctgtacaaagtcattcatcaggatggcattaaaagctgtcagctgatgatgggaataacgatgttagatcaaaacaacaactggaataccatgccagcacacgttcatgaccgtcggatggaggcttatctttatctggatcttgaaaaggactcaaaggtatttcatttcatgggccagccggacgaaacacgccatcttgttgttggaaatgagcaggctgtcctttctcccgcctggtctattcattctggcgcaggaacatcaaactatagctttgtgtgggcgatggctggagaaaattacacatttacggacatggatctcgttccgatggatgggctgaaataagatgggttatctacatgacgccttttcattagaaggaaaaacagcgctggtgacaggccctggaacagggatcggtcaaggaattgccaaagccctagccggtgctggcgctgatattatcggcacatcacataaaagcagcctgtctgaaacacagcagcttgtggaacaggaaggccggatatttacatcttttacattggacatgagcaagccggaagcgataaaggattctgcagctgagctgtttgaaaacaggcagatcgacatccttgtcaataatgccggcattattcatcgggaaaaagcggcagattttccagaagagaactggcagcacgtactgaatgtcaatctacacagcctgtttattctgacacagcttgctggcaggcacatgctgaaaagaggtcatggaaagattattaatattgcctctctcctgtcttttcaaggcggcatcctcgttccggcttacaccgcgagcaaacacgctgttgccggtttgacaaaatcatttgcaaatgagtgggcagcgtcaggtattcaggtcaacgcaatcgccccaggctatatttctactgcgaatacaaagcctattcgggatgacgaaaagcgaaatgaggacattttaaagagaattcctgccggccgctggggccaagcggatgatatcggggggactgcagtctttttggcatcacgtgcttcagattatgtaaatggacatattttagcagttgatggcggctggctatcccgctgacaaataaaaaaagctgacgaacgatcgtcagcttttttccattacatcatgtgcggttcaacaggcaagacctttttgacctcatcaatgatgcgttcattttctccgccagcgtaaatgtgaattgagccgctgtcttgattcgaacgaatcaggcgcccgatgccctgccgtacacgtaacaacatatatggcagatcaacttcttcgaacggatcttttttcgctccgttgcgcttcgctgtaaatacaggatcgtgtggcggaaatggcaatgaccaaatggtaacattcttcaatgcgtcaccgggaatgtcgagtccttcccataagtgaactgaacaaagtactgtttcctcttcctcttggaatttctctactaagctgctgatttcctcatcaccttcgaagaaaattggatacggcagctcccatgccgccgacagctctttaaactcgtttaattcttcaaaagaagggaaaagcaccagcgttcttcctttgtaacgtttgattgtttcaatcgtttcagccgttttttgttcagcggccatatctgtttttgcgtatagattaatactcatttgctcgtcataatcataaggggaatcaacagttaatgacaaataatcatgaatcccaagactgtcggcaatataatcaaacgaaccgccttctgacagcgtagcagaagagaagatataaggaattttcttagaaaacactttttcgccaagtacttctgctaccgttctcggcatcacgacaaaggttgattctgcttcctttttctccagccagctgatcgcatccttttgatatagagataatgaatacgccatttgttcaacatattcttccactactgacagttcgtattgatcaatcgtatacatttcagactcaaatacaagtgcctcaccgattttatcaagtaaacggcaaagctcgtccgccgcctttttgacacgatggtcattttttatttctaaacggtgtgaaccggctacttcctttgattcttcagaaagaacatagaaaaattcgtcgtttgcgagaagcgcatcttcaatcaattctgcaaactcttctctgatgtcattttgcagcaatcgttctaaaaacaattcaagagtagactgcttcactctataggttagcgctttttgcgcagcaaactctaacaagtgcccctcatcaaatacaactgcactatgatcaggcaagagcggcagctggccctctcgtttgcgtgattcttccgtccacacatgctccatataaaaatcatgggaacatatgattaagtccgttgacttgcgatagtaatctctggaaagtgtcagaccgcatctgtgtctcatatcacaagtcagacagtcctgaaacgagtcgtagcttacgtcagaccactcttcattcgatagatttgcgtactgcttacggtcgccatacggataaaagcgctgcatcgcctgtgactcgtggacaaatgacggtaacgactcataaagatccagccatttatcatcatcagaacgctgcattgttttttcaagcttcttcaagcataaatattgctcatgcgattttgacagccttgtatcaattttcagatcaagatgctcagccagcttagaaatatcgccctcttttttcactagctgttcaattaatgtttcatctgcacaagcgatgatggcgggtttgccgacataccttgcatagctgattgcaaaaagaagatataccagcgttttccccgttcccactccagcttcggcgaacatgacttttttctctttaaacgcccgctccagctgaaaagccataaatacttgctcgtcccgaagatcaaaccctttttcgggaaggatatcgtaaaacacgtcaccaatccaattgttcaattcttcataaaaattctttgttttcgttaaagaaaaaggcaaacgtgatgttgtcacctagttccaacccccaactattcgacattcagaccaccaataatatcattttccgctgatgaatacaataaaaaaacttggcaatgccaagttttttgcagtttacttacgattgatcacatgcgacgataaaaaaggatggtctgttgaataaatatgttctaccgctttttctaaattagtttgcgcatgcgaaatcatagacggagacgattcagtcccgagctccttcagctcgtttgctgttgcgtcaagcgccctttgaataagattaaaatgttcgctgttcagcatgagatcacctctgatggaaataatcatcattgtatgcgaacttttcattttatatacatgctttaccgcatgttatcaccgaaacatgcacaaactacacttgatattccgtctccggattatccgtcttatcaacaatattctatcagggagtgatgttgacatgagttatagaaaccgattagatcagcattctgaactgttccatcacaattggacgcggcctaaacgttctaagtctcaagtaaacggtcacactgaaatgtcccaaaccaacattatattgagaagcaacgcgaaagctcaccgttggtaacgatagaatagggctgaaagatgaaagaagacgcatgcagagcgtcttctttttatgcgttttctgttttcttgcgctgcggccttacttttgaccaatattgataataatccgttttaataaacccgttaaagagctttcgtttcttcgttgcttttctgccatatgcttcctcaaagttttcatttgatgtcagcatatacacagaccaagtatcaagcggctcgaacgccttccccatttctttgtacatctgctcaacggcttttttctcgccgagacgctctccatatggcgggttgccgacaattacgccaaattccagatttgtggtaaagtctttgacctgcatctgtttgaactggattagatctcccaatcctgcttcctctgcattttcttttgcgatttgaaccatgcggtggtctatgtcgctagcgaaaattgtaagcggctgatcataatttgccttttcttcgacttcaagccgcgctttgttccacagatctttaccgatccattcccaatcctctgaaacaaaatcgcgattgaatcccggggcgatgttttggccgattagcgccgcttctatcgcgattgttccggagccacagaaaggatcaacaaacgggcggtccggcgtccaattggttaattgcaccaaagcggcagcaagtgtttctttaatcggcgcaccgccctgatcgacacggtatcctcgtttgtgaaggcctgtccctgatgagtccagtgtaatcaaagcctgatctttcaataaagaaatttcgactttatactcggcacctgtttcttcaatccaatcattggctttgccggactgcagcttgagcttttcgacaattgcttttttgacgatccgctgacagtcgggaacgcttgcaagtgttgattttaccgattttccgataacagggaatttcccgttttcaggtataaatgagcgccagttaatcgctttcgttttttcaaacagttcatcaaatgttttcgctttaaaagaagcaacctgaacctttatacggtcggctgttctaagccaaaggttggcacggcagatggcaagtgcatcaccttcaaaaataactttcccgttatcaaccgtgcattcgtatcctaaatctcgtacttcctttgcgacaacagcttcaatgcccatcggcgccgttgcaattagtgtatacttcttcatcgtatcaccctgtcttttgaaacttttctcttttcaagataaaagctctccttatacgggagagcttgttttcatcattttaaatgtaagtggtctaacgttctgtaagccatgttttgttccgtcgtactgcaaacggctcatcacctcgtactcaggcggcaatcatctatctacagaaagcattctgtccttctctccgttgaattccgttaagaaggttcccctaccaaaatttgggtttctcgctcgaggggtttaccgcgttccactctcaccatttctagtgagacttcgtcactgtggcactttcaaggatactcagccatatccgaagacgtaggcttttttcctgccgtcagtctctaaagactgccctagcttatgacttcgctaggcacgaacactacgggcatctcagcaccgtgcgagcatggactttcctctacagattcaagatctgcagcgattacccgaacgttaagaacatgaattattatataacaactgtttacaatttacaagcgccatttttttcaagcgtgatcaatcataaagcttgctgccaaaaacgtgtttttctaagttagacagccgttttaaaatatcaaagtttgttgtgttagattgcacaggctgttttttgctggcttcttcaagctgttttttcagctgcagattttcctgctgcagttcttcaatttcttgatggaaggtttcataatccttaataatcatatctaaaaatttgtcaacgtcttcttgcttgtagcctctaacgcctgttttaaattctttttccaaaatttctttcgcagaaagctttactttatcagcaagcatctttttcacctcgtatcgtgaatcatcacatatattttttcagaaatctgtacggttgtcaaatttctctctcattgttagtagctgtcttcctccactgtcactctcaagtcatccattgtaataaagtagatgggatagccatcctgttcgcgccttttttccgctgtcccaagcatatacttaggggagccttccttttccgggtcatataaaagcagaagcccgtcggacttatcaatgaagaactgatttttttgtttgaattgaagcgggctttcataaggacggtgagtcaggcttgcttcatagtctgcctgagacagaactgcttcatactgttccttattcggttctttccagttcttttcctgctcgtaaaatggtgtgatgacagctacttttaagtcagggtattcctcctgcaaatcatatgcagcttctgccgcccacagctccgctccaagctggcccgaaattaaaatccattctaatccttcatccaaaaaagcaatcagccgattcttaatggctttttttatgtaatacagcgccttgtcatcctgcttaaatatcccgagttcaaacggtttatagcccgtaattgccagtactttcatcatttcacctgctttaaaaaatggggctcccgtgggccccatttgttgtgctgcattgtttacaccatcaagctgcacgttttccatactagtagtcgcagcaaggttttcctgcttgaaaatgctgatgcgtagccgggtcaacatttgagaaagtgtgtggaaagtagtgaacgtgctgaaaatgctggtggtttacgtttgttgtatgctgtgggtgaatgtgcggcacgatagtcttcgaaaacgtatggtgttcacagcaatgagtaggatggacaattggcgccatcatatgcggtctgcagtgatgcatgataaaatcccctttccataaactttattacaatactaagctatgaaaaataaggggtacatgttctgatgcaaagacctattttaaaagtgtgcaattaagctgtctttaaagtttgaaaacacaaaagcaatcaaaaataccacaacaaagaacaagtaaaaaacacccttatacataccaactctccctttaaaaataactaacgtcattttacaggattcgccgctattctacaacaaaatcaatgtgaattcagcaaaaaaaattcatggcgaaacaagtcgtcttttgcgctttcccggggaatatttaagaggaatatttcctcttcagccgggcaattctcacatgcagtttttcagtttctttctctgataagcatgccgcatcgctaagcaattgctctgctatttgcaatgcttttccggattcttttttcttatgctcaaaatatttcgcgagctctattacagcagcgtatctgcacttctggttttgcgagcgggacagcttttcccaaagcggcactgcttcttccaagcggttttgttttttgtacaggagcgataaatccagccgtgcactgtcctggtcctcaaacgatttttctataagcctttccaactgcttgatcgcttggtccgtttctttatgagccataaaccatttcgccatagcataggcttcactgtgttcttttggcgcatgtgattctgaaaggatttttttagacatatggatgtacaatgaaatgagtgataacacatccatttcattatgatgcaggacaccttttaaaagatccggctcttgcgccttgataaaatgaaagtaaagcattggcgccaagtagcccggtgtgtcttctagcctgcggatgccgagctcctctttttcaaccgtgccaagagatacacggtccattttgtgtttccacaggcgtctagctccatgcaaaagatcaaagtggccaaactccggaagcttcggaagtctgtcacggatcaaggtgtgccttgttttcacctgcggccaatcaaaggctttgccgttgtaggtcacaagtgatgtaatgtcaacctcgcttaaaaagctttggtacaaggcgacttcgttccccggtttgggcaaaagatgctgtttgactgtcactcggtcttcatatactctcgcatgcccaagcaaaaaaatggtattcccagctccacccccaagaccggttgtttctgtatcaaagaaaaagaggttgtttttgttatacccttttgctgacaatgtatgcgacaggccgctttgattccacagtgtgatcacttcttcaagctcagaaaagctgtataacccatggcggtgagaaagcggatattctacttctctgatgaggcaatattcatcttcgaagatgaaaggcttcatgccaaaagcctcccactcttctaaaaacgggatgtcatcaaagtggttttcttgtttgcctgcttctattttttgttctccttcgtcgagcgccatgtgctttttcatccgttggagtttcccttttaatgacatatccggcctccctccttacgacatttgatccaacagctgcaaaattctttcctttgcttttatcccttctatttccgtacctatacaagacggacagccgtcatgacaaggacaatgtgtaatcagttgtttcgccgcttcattaatgtctgaaaaacgtttaaagacttcctccgccaaaccgataccgcccggataatgatcatataaaaatatggttggcaatccggtatgggctgctttgatttgagaaacaacatgaacatcatttcgatcacacatgatatacacagggacaatatgctgcagcacattcgagatgccaagaagcagctgttccagtgtcttttccccgatgtcttcatccgctgttttgatttcgagccaagctgcacttgtatgcagttcttcttccggcaaatgaataggtccagacccaatattttcaaaagtggtcatttttatttttttaaaaatggtcggcagggcattgacagtgacgtctccgtagtgcaatgacgtacggcttttttctttcgttttatcgatttctaaaaccttcagctgaactgccaggtttgcatccgtataatattcgacatcgacttttctgacatacgcctttttatggtcccaatcgagcttctcaacttgatactgaacgccttcatgcaaataaatcgcttcatcatgcaaaagcgtcatcgcactaaaacggtccatttcaccgataatccttacatttgcaatatccgactgatcaactataacgacattttcctgggaggcggaacgcaaactgatgtttgaagcagggaacgactcacttgcccaatggtaccgttcgccgttgcggtgaagaacagcctcttcctcaagatactcaagaatatcactgacttccatgggtccaaattcttcatcagctctaaaaggaagctcataagccgcacactttaagtggtctactaaaataatcaaattctccggattgattcttgcagattcaggcgaacgattaaagaaatattcaggatgccgcacaatatattggtcaatcggtgttgaattggctaccatgataatcaaagattcaccgtgtcttctgccggctcgtcccgcctgctgccaagcacttgcaacacttccgggataccccgtcattacacacacttgcagctggccgatatcaacaccaagctctaaggcattcgtactgaccactcctaaaatgtcgccttctctcaggcctttttcgatttctcttcgctctttcggcagatagcctccccgatagcctctgattgattttgttccaatctcttttttcacaagctcctgaatatggcttaaaataatttccacccgaactctgcttctggcaaaaacaatggtctgcactttgtttttaaggaactctttcgccagttcattcacttctacggttgcgctccttctaatattcagcggtttgttcacaattggcggattgtaaaacacaaaatgcttgcgtccgctcggtgcgccgttgtcatcgaccagccgcatcggtttgcctgtcagctgctctcccaattcctttgggttggcaattgttgcggaagtacaaataaaaaccggatcacttccataaaaccggcagatccgctttagccgccggatcacatttgccacatggctgccgaacacacctcgatacgtatgaagctcatcgatgacgatatacttaaggttttcaaacaaactgacccatttcgtatgatgcggtagaatggcagaatgcagcatatcggggtttgtaatgacaatatgacctgcttttctcaccttttgtctgattgccggagacgtatccccgtcatatgtaaagcttttaatatcaatgcccatttcatcaataatttcatttagctcgctcttttggtcttgtgccagcgctttagtcggaaataaatataacgcccggtttgtttcatcttgggcgatggactgcaggactgggaggttgtagcataacgtttttcctgatgctgttggcgttacggtaacgatgctctctcctttttgcacatattgaaaagcggaatattggtgagtatatagttcatcaatgccccttttcgaaagggccgctttgattctctcgtctatactttcgggcataggccttgtttttgcttcccgaggctcaatttcatgccaattcacaacgttttcatttccttttaaatcagaaatgagttcagtcagtgatttctttttcattctttacacctctttgtcaagtacagtttaccgaatatttgtttgcatggctaggtgcaaattttatacagttgaataaaaaaagcaaggcatacgccctgcttatttcgctttgattgtaaggagctttgattcgcctttacgagcagccttttcgcctgccggcaccattgatcctacagcctcaccattcattataacgattgggatgactgtgctgctcgctttttcttttattaattccaaatcacatgtaatcagcgggtcaccgaccttcactttatccccttctttaatgtgggcagtaaatccttctccgttcatattgactgtctccagcccgacatgaattaacagctcaattcccgagcgagtccgaatgccaacggcgtgtttggtgtggaaaatctgaatgacttcaccttcagcgggagaaacgatttcaccgctagaaggttccacggctattccttctcccatcattttctgtgaaaaaacagggtccggcacatctgacaggtccattactgtaccgtctgccggagaataaataacctcttctgtcaccttttcctgagttttgcccattccgaataattttttcagcaatgtattttctcccttctcattcttcaaccgttatcccttcattcaccactatttaaccacactttcaattttgcttcaatttataacaacatctggcatagacgcataatctggttaaaaaaggcggtggcgaaattggaattctatgatgacaaaaagaacgaactgcaaaagaaagaagaaatcataacggaggcaatcgacactctttttcaatcctcagcgttcggcaaccttataaacggatttcagaacctaatcaactcgagtttaaaggatgtgcagacgaccatacatgtcagagaaagagatactgggctgtatatcgatattaccattccggcgacgtttcgagatggcgagatcgtcgttgatgttaaatcgaggtatctccatgtaacactccaagaaaaacagaaacaccaaaatgaggctacctttacaagcatgacaagaacggttcagctgccttatgaagttcgccaagaagatatggaaacgtcttggaacgagcagacaatgacacttttctttccaaaaaataagcatgaatgaacgattcattcatgcttctatcatttaaaaaagctggtaaatccctttattaaagatccgacctgattcattgcactcattacttgacctgtcgtatccatcattttattaaaatcaaattgcccatttgcttttttgaactgcgacataatgctttgaaattgcgaaggctgctgttgattaggccttgggataggataagggttagaaaatacaggcggctgcataggcataggctggatcggagcataaggctgataataatcctgctgtccataatgctgctgaggcagttgttgctctaaataaccgggtgcagcctgctgataatatccttgcatatgctgaggataataatagcccatttgccgaggatagcttcgagagctcccgttcattgcgattcccccctaaacacaacatatttctcttctatatatgtatgaatgacttctattgtttgtgtcacaagtgatgattagcatttgtcaaattgtgtcgaaagtttaaattttttaaaaacagaaaaaagtcgaatcattatggtaccatattttcaatacagatgagaggggatgcaccataatgaacgtatcatacttaagcaaacgttttgcagaaatgaagaaatatgaaacagactgtatgaataaactgatggactttgccaagttcctctatattcaaggacatctcagcataactgagtttcgtaacagtatgaaggttctcgaagcaaatggagcagaaagcccggcatatgagatgaattaacgtccggccccctataaaaacgaaaagaagacagccttttaccggctgtcttctcttgcaatttcatcctttactgcgtgcaatgtataaaggactgactcagtgatgtccttgaatcgttttttatgaatatgatgaacatatgattgaaggaccaattccaggaaattatcttttacggtctcaatttgctctttatgcacatattttggccggtgggcttttatcaattcaagagcaccctctgcccagcgggccgccagttcatcattctcttcaactgcaggctttatcatctcaaaaaaatcataagaatgattactgttttttccttcctgataccgatcagcgcctttttcagcaacttcaatcatttgctcggtcatttccagcaaagtttgtgatagcaatatctttcacctcaatgcctatcgtaccaaatttcactcgcaaattcagccgatgcggtataccttctcaaacgcatacctgtgttcaggcgattgatacagctcatttatacaaatatgaagatctatgatttcttcttccagcacactcaggcgatcattttccgtttcccgcatctcagcctctaatgcatttacagaatgattcaggctttgctcagctcgcgttaattcatcttctatatcagaaagcatacggagaatatctgtcttgcatacataaccggacattcgtgtacctccctttccttgtctctcccgcttaacattctttgctctcaaggctctttccttcctcatgacaaaactagaagcaaatcgccaaacaaacaggtattccacgaaaagctgaagttttcgacaaaaacacccgcaaaaattgtatgatcctcctccttaatgcaaacgatacttgtgaggaggtgccgtatgaaaacaagaccgaaaaaagccggccagcaaaaaaagactgaatcaaaggcaatcgattctttagataaaaaattaggcggcccgaaccgcccttctacgtaagaagcaaggaatttccttgcttctttattttttcagccactgctccaccgcaaaaagcgcatgaagctggcgctttttatgtaaataccagtctgtcaattcaatctgcttcggcaattcctcgcgcctaaagaacgttttctttatctttccatgaaaccaatctgttttcgttccgtctaatgagtggattaactcagggtagcatgtccttagcataggagatgttctttttgtaatcccgatcatcttttccatatcaaaacgggaacctgtgtgcggcactgtgtgcaaaaagtgataaaaagaggagaacaattctggcttgaacagcaattgagacagctgctttcccagccttatcctttcctccgcctttgaaaagcgtttcactgaaatgccgtaaaaaaacccatttgaggaaggaaaaataacggtgttaaaatgaaaccagtcacttaaataaaaaggaatcgtgtcaaaaacattctttttaaacgaaggattttgtataataggtgtttggatagtgttttgttcatttataatgagggcatacattagccgctccgtatttcgctcatgccaaaaacgggtccattcttccgacataaattgtgagacgccaaacacatgcagaagatgaaacagcggtttcccgactctttttgaccagtggtataaaagaagctgcggataggcatccgaaaaaataagccagttcgctctttcataggctaaaaagaaccatttttgctgtctctcacggagtccaagctgaaacagactgccttttaaatcagtcattgaccagcctgcattacgagaaacgaaagaagccaaaagcgaccatttgatttccggatgacggtcgtaaaatgctttataagcatttgttcttgaaatgttatccgcgttttttatttttgtctgccgctcaatccggctcagaagctttctgatgatctgttgttcttgcacgttcattcacttccgtcatgattagtttaataaggaggatgagaaagtgattcggtatcctaacggaaaaacatttcagccgaaacattcggtttcatcccaaaacagtcagaaaagggccccgtcttacagtaatcgcggaatgaccctcgaagatgacttaaacgaaacgaataagtattatctgacaaaccaaattgccgttatacacaaaaagccgacacctgttcaaattgtaaatgtccattatccaaaaagaagtgccgcagtgattaaagaagcttactttaaacaatcatcgacaacagactacaatgggatttacaaagggcggtatattgattttgaggcgaaagaaacgaaaaacaagacctctttccccctgcagaattttcatgaccatcaaatcgagcatatgaagcaggtaaaggctcaagacggtatttgttttgttattatatccgctttcgaccaggtttattttttggaagccgataagctgttttatttctgggacagaaaagaaaaaaacggcagaaaatcaattcgaaaagatgagttggaagaaacagcttatccgatttctcttggatacgcacccagaattgattatattagtattattgaacagctttatttttcgccatcatctggtgcgaaaggttgattaacgaaaggttgagatgttatgtcagatcaatttaacagccgtgaagctcgacgaaaagcgaacagcaaatcgagtccttcaccgaaaaaaggcaagaaacgaaaaaagggcggattgtttaaaaagacccttttcactttactcattctgtttgttttaggcgtagttggcggtgctgttatatttgccgtcatggtttctgatgcgccgtcccttgatgaaagcaaattgaagacgccttattcatcaacgatttatgataaaaatggaaaagagatcgccgaagtcggcgccgaaaaacggacctacgtctcgatagatgaaattcccgatgttgtaaaagaagcctttatcgcgacagaagacgctcgtttttatgagcaccacgggattgaccctgtccgtatcggcggtgcattagttgccaactttaaagacggcttcggggctgaaggcggaagtacgatcacccagcaggtcgtcaaaaactcccttctttcacatcagaagacgttgaaacggaaggtgcaggaagtatggctttcgattcagctggagcgcaattactctaaagatgaaattttagaaatgtatttaaaccggatttatttttctcctagagcatacggaatcggaaaagcggcggaagaatttttcggcgttacagatttaagcaaattgactgtcgaacaggctgcgacgcttgcaggaatgccgcaaagcccaacagcgtacaacccggtcaaaaacccggataaagcggaaaaacgacgcaacatcgtactcagtctgatgaaaaaacaaggatttatttctgattctcaatataacaaagcgaaaaaagtggcagtgaaagacgaaggcgtcgtgtcacagaaggaatatgaaaaagcaagtacaaacaaatacagcgcatttgttgaagaggttatgaaggaaattgatgaaaaatctgatgtcgatccatctgctgacggattaaagatctatacgacattagatacaaaagcacaagataaactagatgaattaatggacggagacaccgtcggatttactgaaggcatgcagggcggcgttacccttctcgatacgaaaaccggagaagtgcgggcgattggcgccggaagagattctacggttggtggctataattacgcgacccaagctaagcgacagcctggatctaccattaaacctattctcgactacggtccagttattgaaaataaaaaatggtcaacttacgagcaaattgatgactcagcttacacgtattcagatggaacacctattcgagactttgaccgttcctataaaggggtcatgtctatgcgtgaagccctcgcccaatcacgtaacattccggctctaaaagcattccaagcagtcggaaaagatgcagcagttgattttgctaatggactggggctcggattaaataaagaaaaagtgtatgaatcatattctatcggaggattcggagaaggtaatcccggtgtctctactctaactatggctggagcatacagtgcattcggaaataacggaacatataacgaaccgcattttgtgaaatcaatagaatttaatgacggcacgaagcttgacttaacacccaaatcaaaatcagcaatgagcgattatacagccttcatgattacagatatgctgaaaacagctgttaaaacaggtactggacagcttgcacaagttccgggagtggaagttgcaggtaaaacaggtacaacaaactttgatgaagcggatatgcaaaaatacaatatcgcacaaggcggtgtaccagattcttggtttgtaggatatacacctcaatataccgctgctgtttggacaggtgtagattctcaaaataagataggaaaaaaatctttaaataaaacagagcaacagattgcaaagcgcatcttcgcccagctcatcgccgatgtcgatgacggaagcggatcatttgagaaacctgacagcgtagtggaagcctctgtagaaaaaggctcaaaccctgcaaaactggcagggccaaatacgccaagcgataagaagctcacagagtactttgttaaaggcacagctccttctactgtttctaaaacatatgagaaagaagaaaaagaggaaacagctaaactgtctggtttaaacgtgaaatacgataaagacaatcaatctttaacgttaagctggaattacgacggagatgcgacctttgctgttaagcaatctgttgatggcggcagctactcagaaattcaaaacagctctgcaaaagaggcagtcatatcgggtgtgcagccaggatctgtgtacaaattcgaagtaacagccgtcagtgatgatggcaaaagtacagcttccacatcctatgaggtgccaaaagctgaagacgatgaagataaaaaagaccagcaacaaacggatgatgaaaaacaagatgatgagaagactcaggatgatacacaaactgatgattctcaaaaagatgacggtcagacggatcaagatcagacagatgattcaacaaacgatcaagacaaaaaacaagacaatacgaacaccaatccgtccgacaacaataaccaagaccaatcaaacgataacgataacgacaacagtaacaaccaggatacgtcggatggtgattcgaactctggtaagaatgattcaacaggttctgacacgaataaaaataaaacagacacatctaataaaacacaaacaaactcatcatccattgaaaaaacaaattaaacaaaaaagccgtcacctttggggtgatggcttttttggtacacaataaaaaacctcccgttttaacaggaggttttatcgattcatcgcatgatatttgtaaaaatgctttttcatttcggtaaacagctcatcaagctgaataaagcaatggtattgggtcggcttaagaagaataaattccactcgttcagcccaattaatcggctttgcgggatatgatttctccctcaattcttgccaatcgagcgatttcaccggctcacctgctgtccaatgtaacgaagccagcaaacacacaatgccctttaacatttcgttttggtcacatctcgattttcgtgtttgaaagactgggagaagtgatgctttgatgtcatcccacacttcaaataaaagcggaacgtatttcccgctgtcttcccatggcaaatcgccttgtaattccgtgcagaaatcaaaatacacgggattggtctgcaaggttttcttcatatccgaggaactcttctggccaagactgcgcaagtattgctcataagaagccaacacttcttttgcttgcgtcatcgtttcaccagtccttttttatccctcttctgcccttctctgcacaaagaaagcagcggacactccgcacagcgcggagattgggctttacagtgatatctgccgaagaaaataagccggtgatgcgtaacggaccagtcttctttgggaaccttgcgcatcagcgtcttttcaacttccagaaccgagtccttccaccggcaaatgcccaatcgtttgctgactctctccacatgggtatctacggcaatggccggcacaccaaacgcaacggataccactacgtttgcggtctttctcccgacccctggcagtttgacaagctcatcgcggtctctcggcacttctccgccgtaatcttcaataatcattttactcagcttttgaatatttttcgctttattacgatataaaccgattgatttaatatcctgctgaagctcttccagcggaacagccaaatagtcttccggccgtttatatttttggaataatgttttggtcactctgtttacaagtgcatctgtacattgcgcagataaagctacagccaccactaattcaaaaggattggaatgaaccagttcacactccgcatgaggaaacatgtcacctatcttgtctaaacagaattcaatttgttttagatttaacacgattgtcaccttttcactttattgttcaagccaattgtaaaaaggaacctgccttttatactctttttgcggttcattctgctttgcttgtacacgccggaatttttggctgtgtatttttgcctgctccacagttttaagcccgtttttcttccattcaaacaaaatccggtcaatgtagcggaaactgagttttcctgatagtacagcctcttttaacgcgtgtttgatcagttgtgcgtcatgctggtcctggtcctgccagatcgccagcgtttcacactccaaaggcgataacggccttgcgaactcttcctcaaaaatggtataaaggcttttttgttccccttctgcttttctttcctgtgtttgattctgtgcaagctgaatatactcgtacagcttgccccataaaggctgaagagaatatttctcaaatttgatgccgttttgatcctcgcattcttcaataaacagaaagcctttttgaataaacatccgcaatctgtttgtgcattcttcaacagaaattgacataccttcctgcagctgattcggtgtaggaaaatatgatcctttttctaaatgcattttaatttttaacagcagaataagttctgtttcattaagcccaagctgtttataatgcgtgagcagaagattggggatggttgatgttccctgctcctgcatatcaataaattgctgttttttcatcgtcacacctcttactgtaaaggattgtgattacccctttactgtaaaaagtctcccttgcaggagactcttttttgtttcatttgaatgtattacggatacagacggtttaacagtcttgggaacggaatcgtttcacgaacgtgaggcgctccgctgatccaagctactgtccgctctaatccaaggccgaagccggaatgaggaactgatccatattttctaagttcagcataccatttatatgcgtcagaatccagtccatgttctttaagacgcgattccaaaagttccatatcgtgaatccgttcagacccgccgatgatttctccatagccttccggcgcaatcaagtcagcgcaaagcacaacgtcctcacggtcagaagccggctgcatatagaacggttttaaggacgtcggatagcgagtgatgaataccggtttgtcataatgttcagcaatcgctgtttcatgaggcgctccgaaatcatctccccactcgatatcgtcaaagcctttttctttcagaaattcaatcgcttcatcatacgtaattcttgggaacggggctttgatttgctcaagttttgacgtgtctcttcccaatgtgtttaattcaattttacaattcttaagaactgattgcacgatgaaagaaacgtaattttcctgtacttgaaggttttcttcaaattctacaaacgccatttccggttcgatcatccagaattcgattaagtgacgctttgttttagacttttccgctctgaatgtcggtccgaaagagaatacttttcctaaagccattgccgcagcttccatgtagagctggccgctttgagacagatacgcatcttcatcaaagtactttgtcgcaaagagttctgttgtaccttcaggtgcgcttccagtcaaaatcggcggatccacttttacgaagccttcgttattaaagaattcgtaagtcgcgcgaatgatttcattacggattttcatgatcgcatgctggcgctttgaacgcagccataaatgtctgtgatccatcaaaaattccgttccgtgttcttttggtgtaattggataatcggtcgcttcgtgaatgacttcaatatctgtcacagcaagttcatatccaagcggagaacgctcgtcctctttgacaatcccttttatatagagcgacgtttcctgcgtcactgatttagctgtttggaaaatgctttcttccacttccgcttttactacgacaccctgaataaaaccggtaccgtcccgaagctgtaaaaacgcaattttcccgcttgaacgcttattagcgacccaagctccgatcgttacttcctcacctacgtgcttgtacacttggttgattgttgttttcaacatatttccctccaaaacaagaaagacattcggaagctcattgccccgcgaactcttttatcatcactttattatacccgctcttaactaaccgggtcaatgcagataaaaagcggcttttctgtcagccgctttttgatctgttagctatgtttttctacaaaacgcttgattctttcaatggctttttcaagaagatctaacgatgttgcataagaaagacggacattctcaggagagccaaatccggatcctggaacaatcgcaactttttcctcctcgagaagcgctttaacaaattcatctacatctttgaaaccgcaagattgagctgcctcttttgcatttgggaacaagtaaaaagcaccttccggcttcacacagctgaaccctgggatttctatgagctttgcatagatcgtatttaatctatgttcaaatgcttctctcatttcttccaatggctcagaaggcccgttataagcagcaatcgctccgtattgtgcgattgatgtcgggtttgacgtgctgtggcttgcaaggttcgtcatcgctttaataatgtcttcagagcctgccgcataaccgattctccagcctgtcatgctgtgggacttcgatacgccgtttataatgaccgtttgctctttcagtctgtctgacagctgtgcaatggaaacatgtttctttccgccgtatgtaagtttttcataaatttcatctgacacaatcaagatatcatgttcaaggcacacttcaccgagcgcagacagttcttcttccgtatacatgacaccagtcgggttgcttggagagttaataacgattgcttttgttttttccgtaattgcatttttcagctgctcaggcgaaattttgaagtgattttcctcaagcccttctacataaacaggctttccgccagcgagtttcacctgctccggatagcttacccagtaaggcgttggaataataacttcatcttcttcatccaaaatcacttggaaaagggtatacagagcatgtttggcaccagtgcagacaataatttgagacggtttgtattcaatattctggtcgcgtttaaatttctctgcaatgctgtttttcagttcagccaaaccaccggaaggcgtgtatttcgtatggccctcgttcatcgaacgcacagcggcatcaataatatgctgcggtgtattgaagtcaggttcgcctgctcctaagccgatgacatcatggcctgcggctttcagttctttcgctttcgctgtgattgccagtgtggttgatggtgttaatgcggatactcttcttgccagtttcaacttgaactccccctaattcgtcttaaggcgtgatatttttgagaatctttccagttgtaaagtccacataacttaaactgtattgcccttctttgtctaagtacgtcacttcccaaagcaggacgtttccttctcttgccagatgaacctctttttgctttgaaaccagcccttcatcctttatgattttcgccgctttgtcttcagagattccctctttcgcttcttttgagagaatttttgcttttttatcagcaggaacccagacatataatgcagtgccttttttatccgttccctttacaacataatatttttcttttccgacaaatgtttcgacttgatcaacattggcgagatcggtttcttttttagcttcagcagctgctgcttcgtgcccctcttccttttgtgccatggctgatttataaatgcttgccgagacaagaagtactgctaaaaaaataataccaaaaatgacggtaaatattaatgctttttttctcatcttctcacctacgtacgataaatggtaaaaacggcttggtttttgttttcttcatccagtgcaaggccgaacatcagattttctcttttcagtgtacgattcaatgtgtccacaattttatacagatcatcagaatgctctacattaattgttgaaagaatttcgattttactttccattttttcatcctccagtttgaacaaatattgtaagtcatactccatttcaggacacgccatactagtatcacagagcgggaaatccgcttttaaataaaacaccatcctactcccacaccgcaaaagccgctttatgcggcttttattctttttcccctgcaacataagcttcaagctcgctgtcagtcatttcggatactgaggttgtcggcaaggcatcaagaaacagccggccgtaaccagcggttttaatccgtctgtccaatataataatcgttcccttgtctcccgcagaacgcagcaagcgtccgattccttgcctgaaggtcagcacagcttccggtaatgacactgtttgaaacggattctttccttttttgcgggcaagctcacattttgcagcatgaagcgggtgatcaggggaccggaatgggagcctcacgatcattactgtcgtcagctcatcaccagggaaatcaacgccttcccaaaaatgatttgttccgagcaggatcgcctgattggatgttttaaaagtcttcatcagcttgccgggacttccgcctgtaatcccttgtgccaagagctgaatgccggaagcactcatgttatgcttaagctcctggtgaacctttttcagcatatcatgggatgtaaacagcacaagaattttaggctgtttttcctttgccatcagttcgatataacgggctgtatcctgtataaattcaggttgccctgtatcctgaattgatttcatttcctttggaatcatcacctgcatacgctcatcgtaagaaaagggtgactcaattctcattgtccgcgggaaaaagtcactcagtcccagtcgttcaatcataaattgaaaagaaccttcgactgtaagggttgcagatgtcagcaccacactatttttgcgcgcgaaaaactgatcagccagaagttcaccaggttcaagaggctgtgcgtaaatggccactgcatttttcgcaccctttgcatctatttcaatccaaaccgcttcatcatcatcagacccaaagaagagcttctgcaacgtctgacagtaatgctgcaagcctttcatgcttctttggtattcatcggctaaaaagacggttttgctcttcatacccttcaaatgtttttccatcagggatgactgcgcctcaaaaagctgctgcaaatttgtcagcatggaacaaagcctctccgcaccatccgttaagatcgaccagcttttatcctggctttctttgttcaccttaaacactagacggtttaagtcttctttaggttttcttcgtttgacaaaagaatgtacagagctgaagaaagcatcactttctgcttgaacgtgctgaagccactcttccaattcgaaaaatgaatcaaccggcaggctgtttcgctggaatagctgtctcatcttttttagaagtccctgctccttcagagtgccgattctgctcaatttcgtatgcaattctatgtacgtggctcttttccctaaatgttcgcttgccgcacgttcaaaatggtgtgcttcatcaataataaatgtcccgctttcgggaagcctttttttctggctgccttcatcggtcagcaaaagggaatgattggtgattaccaaatcggagcgcatagcaatctgtttggcccgctcgtaaaaaccgatcacatgctcactgcgacttcttttataggagtcatcgtcataagccaatctgtcccacagcaattttccgcctgaaggcaaattcagttccgctacatctcctgtatttgtctctgtcagccaaacaagaagctgtgcctttgtcagtacggcatcataattatcatcttcttcatgaagcacctgctcaaatttatacaggcataaataatgcgattgcccttttaaaatcgccgctgttaccggaaatggaaacagatcttggacaatcggcaaatcctttgtgagaatctgctgctgtaaaagcgtcgaatacgtgctgattatgaccggcttttttgatttcttggcaaaaagcgcagccggaataagatagccaatcgtttttccgatgcctggaggagcttcaatcagcgcatgctcacgattggcaaacgcatcagccacctctctcatcatcatcatttggccgtctcttttttcatacccaggcattaactctgacagcgctttttcatttcccgcttcccagctttcgatctcaaatgagaagttctcgtcctcatttatacgaacatcgatagcttcaggttctctgacagaaaacgaagaaaagcgcgtatagcccggtatctcggtatgtctgttttcattaatgaacatatccaacaaatgcgtcagatcactgatgaaatgctgcgaaagccttcttaactgctttaatgtcggataaggaagctgccgcagcttttcaaggatttccaaaaaaataagccctgtcacttcagcatcgctgtcagcccggtgcggctgatcatgccgcagctgaagctcctcgcttaattccgtcagcttatacccttcaaatcccggaaaaacaatgcgtgagagctcgacagtatcaagcacttcacaatctgggagctgaaagcccgccttatgtagctcatacttgacaaatccaaggtcaaaatggatattgtgggcgacaaaataagcgccgtcaagcaattggaatacttcttcagcaactgcttcaaatggctgttcattttctaccatttgattagagattccagtaagctgctcaataaaagcagggattgatttatttggattaatgtattttgaaaaccgctcagtaatttgtccattttcgattacaaccgctgcgatttgtatgattttatcgcctttcttcggcgaattccctgttgtctctacatctataacaacgaaccgttgcttattcattaaaatggacacctcaattcttgcatacgacaaaagtgtaacacgttttgtacggaaatggagcggcaaaaccgttttactctcaaaatcttaaaagaaaacccccgataaagggggcttttcttctacaaaattgtacgggcgggttcgtttcccagcatttgttcaattttgttttgatcattcagaacagccactttcggctcgtggcttgccgcttcttgatcagacatcattttgtaagaaataataatgaccttatctccttcctgcacaaggcgtgcggctgcaccgtttaagcatatgacaccgcttccccgtttaccaggaataatatacgtttcaagacgtgctccattattattattcacaatttgtactttttcattaggaagcattcccacagcatcaatgagatcttcatcaattgtaatgcttcccacatagttcaggtttgcttccgtaacagttgccctgtgaagtttgccgctcatcattgttcgatacatattatattctctccatttctcgaatatcaataatgatgttatctattaaacgcgcttttgaaaaagcaactgcaacagcgagaatcatctttccagcaatttcattcacaggctcgagttccggataggaataaagctctacatagtctatggttccgctagtcgtttcaatgatttcttttgcagcttttatcaccgcttcaggatctctttcaccggcttggatcagttccgcacttgtttgaagggcccgatacagcttaggcgcttcttttctttcctcagctgttaagtatacattgcgagagcttttggctaagccgtcttcctctctgaccgtatcgacaggaaccaattcaatatccatgaagaagtcactgattaacccatcaacaacagctacctgctgcgcatcttttaaaccgaaataggcacgagtcggcttgactagattgaaaagcttcgtcagtacgatcgcgaccccgtcaaaatgtccttctcttgagcgcccgcataacacgtctgtgcgtctttctacatgaatcgtgacattcttttcaccgggatacatatccttagtatctggcgtaaaaagaatatcaactccggcgttttctgcaagagctgcatcccgctcaatatcgcgcggatatgcttcaaaatcttcattagggccgaattgtgcaggattcacaaaaatactcataataacggcgtcgttttcttgtcttgctttgtctgctaaggttaaatgcccctcatgcagaaaccccatcgtcggaacaaatccgattgacttgccctctgaatggtattgttttatggcttctttcagctgtgtaatatcagtaatctgtctcatcttattttcccccgtacaagccgtcaagcactgtctggttcatttgaaaggaatgcttttgttcagggaaagcacgatgtcttacatcctgaacatatccgctgattgctgtttcgatggtttcatcaatgcgcgtatattgctttacaaatttaggtgttctctcaacaccgtggccgataatatcatgataaacgagaacttgtccgtctgctttcacaccagccccgattccaatgaccggtatgcttagcgtctcggcaattttggctgtgagttctgccggcacacattccagcacaagcatcatagctcctgcttcttcgcattttatactgtcttctattaattttttggcgctttgttcgtctttgccctgtactttatagccgcccagtacgccgactgactgcggtgtcaaacctaagtgactgactactggaatgcctccaagcgttaatgcgcgaatggattcaaacacgccttctccgccctcaagcttcagtgcgtcagctccgctttcctgaacgatagccgctgcatttttcagcgtatcttccttggacaggtgataagacataaacggcatatctgtcacaataaaggtattcggcgcaccccttttaacggcttttgtatgatggatcatgtccgcaactgtcacaccgacagttgaatcaaggccgaggacgaccattccgagtgaatcaccgactaaaatcatgtcaactcccgcttgttcagcaagtttagctgccggataatcataagcggtcagcatgacaatcggttcttcagactccttcatttttagaaaatccagttttgttttcatgttttctcctcctcatgtttagaggagatgatctgccgttttcttctgcaagccaaaaaaccttccgttacaacgagaaggattcttcactttctaaagttcggcgagtttcatccctctgtcccagtccttttttggatcaaggcagactgctgcaatgtctatctattttaacaataggtgcagttcgcaggcgatactgcccaatggaagtataccaaaatcaacgggcttgtaccaacacattagcccaattcgatatcggcagagtagatttttttaatgccttcgttcgtttctaaaagcagaacgccttcatcatctatacctaacgccttaccgtaaaaggttccgtttaacgttctggctctcatattagtgctaataccgagcgcatagctttcccataaaagcttaatcggcgtaaatccgtgcgtcatataatcccggtaccgtttctcaaagcatagtaaaatatgctggatgacgccggcccgatcaattttttccccagcagcttggcagaggcttgtcgcgatgtccttcaattcatctggaaaatcattaggctgctggttaacgttaatgccgatcccaatgatcactgaacgtacgcgatcttcttcagcctgcatttccgttaggatgccaactgttttttttccgttaatcaaaatatcatttggccatttaatatccgtttggatgcctgctgcctcttctattccctgcacaacagctactgcagcaagaagagtcagctgcggtgttttttggagcggaatgtcaggccgcaaaatcaggctcatccaaacgccgtttccttcttgagaatgccataccctagacatccggccccttccggctgtttgtttgtcagccaccacgagggtgccttccggtgcgttattattcgcgagctcatgagccgttttttgcgtgcttgaaagaacgtcatggtaaataagatgctggcccatcacttccgtttttaatccaaaacgaatttcgctttcactgagttttccgggttttttgatgagccgatatccttttcttctaacggcttctacttcataaccctctttccgaagctcttcaatatgcttccacacagcagttcttgaacagccgagagcatcactgattttttggccggaaataaattcattgccggcctgagaaaataattcaataaggtcttttcttaatgttgaccgcatgtcttcagccactcctctatgtgtttcttttgattggagagcttccctgtcacaacagcctgctcgatccgctgtaattcttccgacacccattttccagccggccggtttcgaagcgcaagcaagtccttacccgtgatatcaagatccttaaggcttttgatcggcaggttttgataagcgtactgaatgtccttcagtttcttttcatccagtttttcgttttgccgaagctgcgatactttggccgctgagagcagtgctttttccccagctctgtacattgtcattgcgtcaaggctctggccaaacgtatcggcaatgtgaatggcttccttaatcacttttcccgggagcttccaacctttcaggaaaaggggcgcgtctttcaagactatgccaaggttaattaaaagagcagcccaaagctcctcacgggatgttaaagagaagaatggaaactcactcgttgaaatcaggttttctcgtttatgataaaaaccaggaagctcttcatacaatctcgtttgaatgagtgtttgaagcgcctggcgagaagctcttccctgcagcaatttctcgaactctatagtttttcgttcgactgaaacatgggagaggagtgatttttctttcgcaatggcttcttctgtttccggtgaaagcgtaaagccaagctggctcataaagcgtacggctctcagcatacgaagcgcatcctcttgaaatctatcctcaggctttccaacggttcgaatcactttctgatcaatatctttcttgccgccaaaataatcaagcaccttcccgtccgctgtcatggccatcgcattgatcgttaaatctctgcgttttagatcctcttctaatgatgagataaattgcacttctgacggtcttctgaaatcaacataatcagattcagtccggaatgtcgtgacttcataggtttcatcctcccagagcacaataatggtcccgtgctctttgcctacatcaacagtccgctgaaacagccgttctacttgatcaggtgccgcatctgtcgcgatatcgacatctccgatcgttcgtttcatatagctgtcacgaactgcgcctccgacaaaataagcctgatggcctgcttcgattaagatgcggagcacgggaagtgctttgataaaaactttttccatgtgatcactccggttctgctaaatcggcataaatctgttcatactggctgacaatttttttagaagaaaattcattttcaagcatctctattgccgcctttgtaaaacgattgcttagctgttcatcttctaaaatgctcatcgcgcgggctgttgcggccgtaacatcaccgacatccaccaaaaatccgctcacattgttttttataacctcagggataccgccaatgtttgttccaatacaaggcactccgcaagccatcgcttcaagcaggacaaggccaaagctttctttttcagatagcagcagcttcaaatcgctaatagaataaagctcttcaacacggtcttgatttccaagcattaagacttggtcttccaagccatattttctgataagctcgcaggctgtcgatttctccggaccgtctccgactaaaagcagcttcgctttcgttttgccagcgatattgcggaacacacggatgacatcctgcacgcgtttaacttttctgaagttggacacatggatgacgactttttcatctggtaaaattccatgtttctctttaattgccgctgtgtttttcttcagatacacgcgctcgtctataaagttataaatcgtttcaatttttttctccggtttaattaaatcgtacgtttcagccgcaagcgctgaggagacggccgtcaccctgtctgatgactcaatagcaaaacggatcagatcttttagagacggatcataacctaacaccgtgatatccgtgccatgcaaagtggtaacaatgccgatattgcgtttcagcatttgttttgcaagataggcgcaaacggcatgcgggagagcatagtgagcatggataatgtctaaattctcccgttccgccacctcagcgattttgcttgccaatgtcaaatcatacggaggatacttaaaaacagcatattgattaacctcaacttcatgaaaatgaatattgggatgatatgtattcagtctaaacggaatgcttgatgtgatgaaatggatttcatgtcccttttcagcaagctgcttccccagttctgtcgcaatgatacctgagcctccaacgctcggatagcatgtgattcctatttttagttttctcattgttcgcccccaagcacatcatgatcaagcatcagcatccgtttggaaaagaaaccttcggcatactccacgcccgcttctttaccgtaaagcttttctctcgcttcaacgatttcaatatacccattcgtcagaggagtagaaacggaatcctttgacgggataaactggcttttgtaggcgttgaggctttgtttctttgcctctattgtatccgagatatcaataacaaaatccggctgatgaaaaccatttatcatataatagtaaaccttgctgactttatgcgccggaaggcttttttcgtctttatatttatggattccggcggaaaagatcgcttcttccaccagtgcagccgcattggcgtgatccggatggcgatcctttttatacggcataaaaaccgcttttggccgacagattctgatgacagtgacaattgaccgaattgcctgatcactcattattaggccgcggtctggaagcgttagctgaattcttttatctgcgcctaatatgcgggctgcttcagctgcttcttctttacgcaaactgaccgtaccgttagaagagagttccgcttctgtcaaatcgcatatcattacttttttttcctgtttgacaaacttcgctattgtgccgcccattccgatctcgacatcatcactgtgggcgccaaaagcaagaacgtcagcattatacattcggctcttctccccgaagaaggtcacggaattcgaaaacaccttcatcaagtgtgcgcacaagaatttccgcagtacccatatttgtggcgagcggaatggaatacacatcacataaacggattaatgccgagacatccggttcatgcggctgcgcggtcagcgggtcgcgcaaaaaaatgacaagatcgagtgcattggcagcgatcagtgcaccgatttgctggtctccccctaaagggccggattgaaaacgttcaatttgaagacctgtcgcctcatgaattttcaaccctgtggttccggttgcgtatagatcatgattctttaaaatatcccgataggcagtcgtaaattgaaccatatcctgttttttcttgtcatgcgcgatcaaagcaattttcattgtttatccccccgtctaatcaatgatattttctaaaccatacacaagctgatcaatcttcatgacttgttcgactgacagtttaacgcctgacatgaaagaagcacggttataagaatcatggcgtatctgaagcgtttggccatccatgccgaacatgacctcctgatgcgcgatcagtcccggaagacggacgctgtgcaagcgaataccgttttgctccgctcctcttgctcctgggagaatttctttttcatccggatgtccttgctgcttttctttacggacttctgaaatcatttccgctgttttaagcgcagttccgcttggtgcgtcaagcttctggtcatgatgaagctcaataatctcaacatcctcaaaatagttggcagccatttttgaaaatttcatcatcagtatcgcaccgagcgcaaaatttggcgcgatgatggctccgatccctttttcttctgttaaagatgtgagctcttttaaatcagcttctgagaaaccggttgttccgacaactggacggactccgtgctctaatgcaatttttgtatgtacttttccgatttcgggcgttgttaaatcaatcaagacatccggttgtgtttctgtaaaacaggcatggatatctgtataaatgaaagcatctgactcaacaggcatcacatcagataatttttgctgatcgtatgtatggtctatggccccgacaaggtcaaaatgaggtgttcgttctgccaatttaacagcttcctgccccattcttccacgcggtcccgcaatgactactttaattgtttcgtttgacatctcgatctcctctactttccttcttcttttctggtccagcgatctttatctcttgtattaaatttatgcatgactcggtcgtgggcttcctctaaagagatatcaagggagttggctaaacaaaccaatacaaatagcacatcgcccatttcctcttccatgcttttatcatcttcagtcgctttttttggtttttctccataacggtgattcacttctctggcaagctcgcccagttcttcagtcagcctcgccatcatggccagcgggctgaaatatccttctttaaattggccgatgtaacagtctacttcagcctgtatgtctttcattgttttatcactcactgaacgaaacctcctatcatcctcttacatgttagctaattcagatacgtttgacaaatgtttaagcacgtttgctgttttctttttcatccactataatataaacgctatctaatggaaggaaaaggggttttatgtgatgcttggagaaattagattaaaaaacatattttttattttaatcggagcggcaattttttcatttggcttggttcatttcaatatgcagaacaatctggctgagggcggttttacaggtattacacttttgctttatgcccttttccacatcagcccctctatatcgaacctggtgttgaacattccgattttttttattggctggcgtttgctcggcaggacaatgtttgtttatacccttgtcggcactgtagccttgtctttgttcctcagcatctttcagcgatatgaaatccatatgccccttcagcacgacttagcgctcgccgctttatttgccggcgtattcatcggagccggcctgggaattatttttaagttcggcggtacgacaggcggtgttgatatcatcgcacgtttagtgaataagtattttgggatcccgatgggcagaacgatgtttgctttcgatgcctgcgtcatcattttgtctttgcttacttatctctcctataaagaagcgatgtatacgctggtagctgtatttgtagcggcaagattaatcgattttattcaggaaggcggatacgctgctaaaggcgctacgatcatctcttcgaaaaacgacctgattcagaaaaagattcttgaagaaatggaacggggcgtcaccattttgaaaggacaaggctcctacacaaaagaggatatagatgtactttattgtgtggtgccgaaaaacgaattggtgatgctgaaaagcgtgattaactccattgatccccatgcctttgtagcggtaagcgatgttcacgatgtgctcggagaaggatttacgcttgatgaaaataaaaatccgcttccgcgctgacatgtaatagaaaaaaggcggctgaccgccgcccctcacccttatttagggtagtccctttttttcagcttgtttttttccgccttgtactttctgtaaccgacataggtaagagcagtaatgatgatactgccggttgtaatcatcacccagagtaaagacggatcggcatcatcctcctccaccctgtcaaacacatttttcaggtcatgctgaagaagggaaagccgttcaagcttcgtgctctctgtcatttgctgaaattcctcttgctcaataacatctatatgttttccgactgtttcaagctgatcctctgatacatcgattgtaagactggggtaaatcaagtcatataaactgataaattcattccatttttcatgaaagcttatgcttccattcttctggacatctcgcttcagctcagtaaaagcttccataatcggtttttccagtgagccccaaagcgggtcagaccgattgtcaaccgcatccatcagcattctgaactgcgcggctgctctgagtttttgtgtgtctgatgtatcagcttgctttaaactccgaaccatatcattatagcccaatgtgatttgacgaatttgggctcccgttagcatggggtcttgctgttttttctcagcggattttaatgttttttcaaaatactccaagacttgaagcgcctcttcatatttcgcctgtcgggtcatttgaaagactgtatcggataaatcattcaattcctcgaggcttccccgctctgcagccttggcatttccattataaaaaataagtgcaatcaacaaacagatcgtcagctttcgtttcatgcaggtccctcccactctctctccttacagaatatgaagaaagggacaaggatagaccaacattgtctttacatcagctcaagcttcgtttgtttttttgagaccacaagaaagtaagcaagcgcgattgaaaagatgcttagccaaaatgttccgtatcctatttcagtcatataatcagaaagcatagagtattgcggcatcatatcaaacaagtagtcaatgacatcgttatgcagtgtccagactgcagcaattgcaagatgccaaaatgaaaaacgaaaatacggactgtataatacgccttgaactgccattgcaaaatgcgaagcaattagcatgtagccctcccacggcaagtcaccagttactgcaagcacaagaaaattcatagccaccgcccataggccatactttacgagggtaactagcgcaagcgcctcaaagaacggagcattccgtttcatgagaaaggcaagcagcacaaacagaaagaaaaacgttgctgtcggactgtccggaacaaaaatcaggaaacgtgccggtgtctccaaaagctgcggcaagtaccaatagtagccgtaaaccgttcccagaaaattaatggctaagacaagaataagcatcggccgctgccctaatacatattgaaaccatttcacatcgaatcaactctcagtctgtaaaaataatatgtccaaataaaaaagctgacgccgggtcagcttttgataataaaagtatatccttccatttgacaattcacaatacgttattttgcggttgtttcagaaataaattttgcaagttcttcgagctgcttatcatttcctttgaacacacccgccggcattttgcctttcccttctacagcgatttttttgatttcatccggtttcagcccgctgtcaaccaatgaaggcccggccgctcctccctgaaggttatccccatggcaagaaatacagccctgttccttaaaaaccttatatccttctgcattggtgtcaatgtcggcttcttttgtaattttcccctgttcttctgccttggcccagtcatgagtagcaactgactgccacgtcaaaaatacagcagcggaaatggccagaagcatcataccgacagcgaccggacgcttccacggccttctttctgtccctctgtctaggaatggagccaaaagcagggccccaaaagcgagacctggcataatcatggcgccgaccactgtaaagcttccggcggcgtattcatacttcaacagctggtataagaaaagaaaataccaatccggcagcggaatatacccagtatcagtcgggtccgccatccgctccaaaggcggctgatgcacaatcgtcaaaacgagaaaaccgatgagaaagacagctccaaccatccattcctttaacaagaaatttggccagaaagcctctgttttacccggatactccgaataatccttcggtatattcggctttttttcagccggtatccttgagtcgcctacaaatttcatccctttgccccggtgcatgtcatcccctcccttttattcgcagatcaagagtttaaagcggtcctgaaatcccctgcttccggatcataataaaatgtgcagccatcagcccgaacaatgcggcaggaagaaaaaatacatggatcgcaaaaaacctagtcagcgtttgggcgcctacaatatccggatgccctgcaaggagcgttttaacttgcgttccgatcaaaggcgtagcttcggcgatctgcagcccgacttttgttgcaaacagagccttcatatcccaaggaagcaagtagcctgtaaagccaagaccgagcataacaaaaaagatcagcacaccgacaatccagttcagctcgcgcggttttttatacgcgccttggaaaaagaccctcagcgtatgtaaaaacatcatcacaatgaccaggctcgcaccccagtggtgcatccccctgacaatctggccgaatgccacttcattttgcaaataatataccgattcccaggcatttttgatatcaggcacataatacatcgttaaaaacattccagataatacttggataacggttacaaaaaacgtcagtcccccaaagcaatacacaaacgcagagaaatgatgggcgggattcacatgttccggtacttcgtgatcggcaatatccctccacatcggtgtaatatcaagccgctcgtctacccagtcataaattttgttcagcatgtcacccttcccccttaggctttgcttttccaagatacaggaagccgtcttttacttcttgctcataatgatcaagaggcgcaagcggcggcgtgccagggacattggtgccgtccttttcatagagtccgtaatggcatggacaaaagaatttattcgggtttttaggatcactattccagttcaccgtacaccctaaatgtttacaaattggcgaaagtgctacaatttcatccccgtttttgaagacccaggctgatcttgactcttctgactcataccaggcatcgacttgattaattttaaaatcaaagcgctgcggctcttttgtcaactcatcaacgctgacaacctgaaccatatcctgcttccctgtcgattttaataccgggtcgagtgcgaagcgaaccataggcatgagcatactagccgccataaaacctcctacacctgtgagcgtgtaattcaaaaattgacgtctggatatatcatgttttccgcccatctcttctcccccctctaggtcacccctgcaaactgactaaaatagaaaatattgcaataactctagacaccctcataatatatgaatctctcagcaaggtcaatatagccaaaatattgtttataaggaaatgtaagtgtttttatgaagtgctccataactgtaacaaaacgttcaaaatttcagcagtgcgttcatccaatatttttcttattaaagagtcatttaaatgctctaatggaacagacggtgtaacaatgattttgcctaacgcatcctcagctctccaactttcgtcagatgtgagcaggacaacatgcggaaattccgttatcagctcttcccgcaaatccttaagcccttgaacggttatttcatttctatcaacatatgtataaggcggaagtaaatatacccgtccctttaactgcctttcaagttcttctgagagaagctgcgtaaactcgcctttctccgccgccattttaaaatggttattaacccttatgttaattaatggtatgacagcggtatcaatgtaatccttagcttgtaaatagtccttggcatcagtgattctccacctcatcgttctccccctttacggcaacaagccttgcaattcactgcaaggctggtcatattatgtgagctgatttaattggcgcgataattgttcaaatgcctctttatcatgacgatctaacgcctcgtcaatgtcttttaataatttttctctttggaatgtggaaatagcgtgctctaaaatctgttccgccaatccctgatcttttttattctcaaaaaggtttttcggaatatgcgggttggactccagcaccgccgcatattcaggtgagctgtaagccgaacggaaattaagctggataaacaaatcctgctgtttatttaatctaatatcatgaaaagatttttccgcgtcggtagtcatgacattctctttatagaaccggaacggaacttcttcaacacaatgtgttgacattataatgcctctcgggcaaaattcagcctgctccacaaaatgaaccttctccatgagagaatcatggctcattaagtagttcaagatccaaacgcactctcggcgctttaactgataatggtttaaaaaccaacggataaaatcttttttctcattgacagaaacaggggtctgcatgtaattccctcctctatcgttcgtataatctatatacttatatgttccacatgaatggttaatattcctgcttatctagaaaattcatcctcgattcgcaaaatcgtttcttcaagctcttcattggctccgtccatttcaagaacctttttcaaaagcggcagcgcttctttttgaagaccttcttctaataggaagcttgcgtattcatataagaaatctctatcctcccggtaatgaagataggcagcctcaaaggattgttttgcttcctcgtattgctctaattcagtatatgcgcttgcaagataccaattgtatttaggatcttcttcaccgtagcttcgaacctcttgaataagatcaatgatctgatcataatcctcttctttgtgatacacggcaagaagtgtatgaagcgcctcgacaaagcccggatcaagcgcaagcgcctcctgaagcagcttcttcccctcttctgacttcccgattttcaaggccattttggcggcataaaggaaaagttctttgttatattcatcatatctgatcccctcttttgccgtttttaatgcctcttcatacattccttcagcttcatagcttttcgagagcggcatataaagtgaagtataagatggatcaagctcctttaaatcagacagctgcttaatagctgttttcacaagccccgcctgtaaggctgtaaaaccatagccgaaaatcgtattaggatcaggattctcatcgacagctttctcataccatggaatggcatcctcaaattcacctgaggcacttaacgattctgccagtctttgatggacattaacgcccccgatctcactctgctcctcagccgttgttttaaaatattgaaccgcttttgcataggctccctgagcaaagtaaagttctcccagtgcaaaatcaataacaggttcattgtccagaatggactttgcctggaaaagcttttgttcactgacttcgaataacccctgcatctgataaagatccgccataagcagcaaactttccggatatgatggatctgtttccggaatagtctccagcacagcgagggctttttcttcttcgtcaatatctattaaaagttcagcgtagaaattcgtcagttctgtttcatttggatataaatcatgtagatcactaatcagtgaaatggctttttctacatcgccccactcgtaataaagctgggctgcaatggctttatcttcatcatgcagctgtttttcagccttcgagagcgtgttgaggcctttttctgtttcacctgcttcaactaattttatggcttcttgaatcaatgtattcaaatcggaccggtcctttcttttcctatacaacatcaaccatacaaaaaagctttatttgttcgggttaatcttatcataattcagacgaatgcccccggcaaataagatgcttctgtacggaagggaattattgagtcttattagtttaccaaaagatcttgagatagaaaatgaaaaaaggaagatcgccctctgtacagtaaagcagctctttgacctgccggcttgtaagtaaagcacatcccccttttcgtttttctatcccctctataagacaagctatgttttttcgcctcgaattatgatctgcataaaaaatcctgaagtaaaacttcaggattttttcgaaagcttatttaaatgctcgaagaaggttggataagaaacgtgaatggcatccgtgtgctcgatttcaatcggctcctccgttatacaggaagcaataccaagcatcattccgattcgatgatctccgtggctggacactgccgcgccgcctttcaacgtttgtttgccataaaccttcattccatctgctgtcggttcaatttcagcacccagcttgcgaagctcagaaacaacagtatcaatacggtttgtttctttcacttttagctctgccgcgtccttgataacggtagttccttcagcctgagtcgcaagaagcgcgatgatagggatctcatcaattaaacgcggaatgatatctcctccgatttcaactgcctttagagatgacgtttctataatcaaatctccataaggctctgcaccgctatcagcagatggtttgatttcaagttttgcccccatgttttgaaggacatcaataatacctgtccgagtcggatttaaacctacgtttttcaatacaattctgctgtttggaaccatcgcgccagcagcaaggaaaaacgcggctgaagaaatgtctccaggaacaaaaatatcagcagctgtcagtttctggccaccagcaatggaaacactcgtttgatcttcagaaagcttaacgccaaaagcagaaagcatccgctcagtgtggtcccgagatttatggggctctgttacagttgttgtgccctcagcctgtaatccggccagcaaaacagcagatttaatttgcgcgcttgcaacaggtgatacataatcaattccttttaatgaagcgccgctcactgacagcggtgtaaactctccgccggctctgccgtcgattttagcccccatttttttcaaaggctcagtcacacgcttcattgggcgcttcgcaatgctctcatctccggctaccgcgctgtaaaaaggacggcccgccaatattccgagcatcaggcgaatggttgtacctgaatttccgacatctaaaaggctttctggctctttcagggcatcgattccttttccgtgaatcacgacatcgctgctgctttgctcaatgtgaacacccatttttctaaagcaatcgatcgtgctcagacaatctgctcccggcagaaagtttttaactgttgttgtgcctgccgctagcgcgccaaacataacagagcggtgagaaatggatttatcaccgggaatatgtatttctccatgtaaggtctgcaccttttctcgtttcattttttccacctcaatcagcataaaaagtttcatattccgcccgggcttcaatgcattgttctgcccttttgcggtcgtcatcagactgaaaactgatccttaaaatcccgttaatatcctctcgtgtttcgataatgcggatattcgtgatactgatgcgctccgcagctaagatcgctgttatctcggatattacacccggatgatcgggtacatccacatataaatcataaaatgcaggtatcgctcccttctgccgaagcggcagcccgtcgcgataatccttggcggttttaaaataacgaaatagattttccgcatcttcttgttctacatatgtacggatcttgtcaatttcacgaatccactcatcaaaacggtctaagattttatctttattatgtaataaaatatcccgccacattgccgggctgcttgatgcaatccttgtaatatctctgaatccgccggcagcaaaacgcttaacaagcggatacaggttttccgaatgatgggtttggtgaacaagactagctgctacaatatgcggaaaatgactgattacacttgtaacgccatcatgctcctccggcgacatttccacaaaatgggcattcgtacccttcagcagattttttaactgttccacagcttgtttgtctgttttctggcctggggttaaaatataaaatgcattttcaaacaggaactccttcgcagcggccactcctgatttatgtgaacccgccatcggatgccctccgacaaattgatagcggctaggcagcacttgatcagcgtaatcaaccactttttgctttgtgcttcctacatccgtaatcaaaagctcatgttcaattcctgaatgagccagcgcttcaagcataaccagtgtttgttcaacaggtgtcgcaatgattactgtagctgcctctttcgcaccgctaataaacgaatcagcacgatcgtctatcacgcctaattttaatgccgctaccgcctgttcatcagagatatcgattccgataatccgtttgccgggatgattttttttgatggctagggctatcgaaccgcctatcaatccgagaccggcgagcaatattgtatctttcatttgattcatacgtcatcacctggtttatagactaaagaggtgatattcgatcacctcttataaaatttcagctaaaatggcaagtatttcttcattttgctcttttgttccgatcgtaatccggagtgatgtcgggaaacctaatgcatttcctgaccggacgatatagcctttttccagcagagcctgaaacagttcatcagcaggacgtttaaagtcaattaacacaaaatttgtctgtgaagggtagcactttaaaccatgagttttcgcaaaatcataatactgctgaaggcctgcattattttgctcgacacaggaagcaataaacacttgatcatcaagtgcggcaatcgccgcagcctggcccagacggctcgtattaaacggctctctcgccggctcaatctggcgaatcaggttctcgtcagcaattccgtatccgactctgagcgctgccagaccgtatgcctttgaaaatgtgcgcaaaatcatcaaattggaatacttgcttaagagcggcacggtttccgggtaatcctctgctgttacatattcataatatgcttcgtcaagaacaacaaggacacgtgaaggaacgcgctccagaaatgcgagtaattctccttcagatgtataagtgccagtcggattattcgggctgcatatccaaacgacttgtgtctgttcgtcgatggcttctaacatggcgtctaaatcatgtgagccgtcgggacgaagtgcaatttcacgcacttcagcaccttcaataaccgcattatgtttatattgcggaaaagtcggggcagcagtgatcgtattggttttattgtttagaaatgcccggcagatgatctgaatgatttcatcagaaccgttgccgaaaataagtgatgtttcgctgacattgaggtgcttactgagccttgtccgcaaagcggcgctatacccgtccgggtaaagggctagctgttgaatctcatgatgaagcgcctcttttgcagcctctgaacagccgtaaggattctcgtttgaagcaagcttcacaactttatccaagccatattctgatttcactgcttcaatcggctttccaggctgataaggcttcagctgttttaaatgttctttgatacgcaaatcagtcacctcattttaaactgtacaagccgctaaacgccattgcataatcctcaaactcctgcagcgcctgatttctcgtttcagcgctgatgagccggtcctttaattcttctatttttctgacgagcgcacttcccactacgacaccgtcactaatttcattcatctttatgacctgttcacggtttgatataccgaaccctacagcgaccggaacagtgctgagattcttcactgtccgaatgaacgggtacacggatgaattgaactcattgcggacaccggtcacacccagagaagacacacagtagacgaagccctcggcttgttcaataatggttttcaaacggctttcgcttgtcggcgcaaccaaagaaatatacgtcacctcatggcttttacattcctcttgaaggctgttgctttcttctagtggcagatccggaacaagcagaccgtcaatatgattttcccgcagtaaagcgaaaaagtattctttgttcaattgtaacacaggattataatacgtaaagaggataatcggaatattcactccgttttttttcatttctccgcctaattcgattgcctttacgatattcattccttgatcaagtgcccgctttgaagcccgctggatcaccggaccgtctgcaagcgggtcagagtatgcaacaccaagctccaatgctgtggcgcctgctttttggagtgacttcgccagttcaatcgaaacctcaggaactggatcgcccaccgtaataaacgggataaacaatttttctgatggttgaagatcaaatttaaacatgggctttcacctcttcttccaatacattcattaatgtgttgacatccttgtctccccggcctgataaacagacgagaatgagttgaccgcgatccattcctttggcgagtttgaatgctttcgctaacgcatgggcagattcgattgccggcaaaatcccctctttttctgacaaaagctttaatgcatccaccgcttcttcatcagtgatactgtcataagtgacacggccgcttttatgcaagtatgcatgctccggaccgattccaggatagtcgagaccggctgaaatagagtagggctcaataatttgcccgaactcatcctgaatgagataagtcaatgaaccatgaataacccctacggttcctttcgaaatagtggcggcatgaagaggcgtatcaattccttttcctgctgcttcagcgccgatcagttcaacatcttcatttaaaaatgcctgaaacatacccatcgcattgcttcctccgcctacacatgccactactttatcaggcagagtgccttcaatacgtttcaactgatccttcgcttcctctccgatcattttttgaaattcacggaccacttgcggataaggatgcgggccgacaactgatccaatcatataaaagtgatcctcacaatgctgaacccagtaccggatcgcctcatttgtggcatccttcaatgttccgtttccgcttgttacaggcactacctccgctccaagaagcttcatgcggaaaacgttcagagactggcgggcaacatcctcttcacccataaacacagtacaggaaaagccgaatttggctgcaactgttgcagcggcaacaccatgctggccggcaccggtttcagcaatgattttcgttttgcccatttttttagcaagcagcgcttgacctagcgcattattgattttatgagaacctgtatggtttaaatcttctcgtttcaaatagattttcgcgccgcctaagtattcagtgactcgatcagcgtatgttaatgcagtcggccgtccggaatagtcctttaacagcttataatactcttcacgaaaagcggggtcatccttgatttgtttaaatgctgtttctatttcatctaacggctgcatgagtgtttccggaacaaactttcctccaaaatcaccgtatctgcctatttcattcggatatggatacatatcggttcatcctttcttctaaaagcctcatcagattctgatctttttgtccgtttttttcaattccgctggcaaggtcaattccttctggctgccatttcaataggctggtgatgctatccggattcacgccgccagcgataaagcagcgtttaccaatagccgcctgctgatattccggcacacattcccaagaaaatgcaacaccagttccgcctctagacccttttacagatgaatcaatcacaaagccgtcaacattatctttaaagcgggctatttcttgagttgtgttaccttgatggtgaagcgccttccatatttcacagcctgtcagcttgcgaagagcagcagcatccgccggtttttcatcaccgtgaagctgaatgacgtcgagcttcaagctcttggcaatacgtgacatcgtctctattgattcattaacaaaaacacctgcaacctgtttttcgacacgagcttggttcagccattttttcacatcttgcggagatacttttcgtttgctttcagcaaaaataaatcctaggtaatcagcctgtgattccgccgcaagctgcaaatcctttagtgaccgaataccgcaatattttaatgccggtttcttcacaacctcactccccaaacaaagcatggattgctttacgctgagaagtttgtctcatcaatgattcaccaataagtacagctcgcgccccatgttcattgacaaatgttaaatgttctaaagaaccgattccgctttcgctgacaagcaaggattctttcggaacgagagatgcgatttgttctgtctgctttacagatgtttcaaacgtttttaggtttcgattatttacgccgagaatgtcgggtgtgaacactttcaatatttgttctagcgttgatgcatcatgaacctccactaacacgtccatccccttttcacctgcttcaagatataattcatgaaggtgtaagggatcaagcacctcgccgattaacaatatggcatccgctccgattcttcttgattcctctacttgaagagaatcaataataaaatcttttctaagtacaggaatcgaaacagcacgctttacgtctgataaatagctgttttccccttgaaaaaacggggtgtctgttaaaacggaaatcgcatctgccttcgcagcctcatagtcttttgcaatctgcacaggcacaaaattctctttaataagcccttttgacggcgatgctttcttcacttcggcaatcaacccgataaaccgattcgggcttgccagcgcctccttaaatgaacgtttctcgaaaggctgctctaccggcaaaaccagtgttttcacttcttctttcttttgtttgatgattttttcaagcatagatctcttcctctttctgctttagtcgttcaagctgcgcggcagcgcctccgcttgtaatcgtctctaacgccagctccgttccttccttcagtgaggcggtaatccccgccgtgtaaatcgcagctcccgcattaaaagccgtaatagataaagcggaactgctgcttttattttcaaaaatattctgaatgagataggcgctctctttcggtgactgcacctgtaaatcttcaagtctgccatttgtgaaaccgaaatcttcgggtgaaacggtatattcccggcgctctccgtcctttaattcaatcacgtcggtcggtgctgtaattgaaagctcatctaaaccgtcacggcttgatacaaacatgacgtgcttcggctgaaacgtctccagtgcgcttgccatcagtccagctttttcaacagaatagaccccaatcacctgacgcttcgcctgtaaaggattgctgagcggcccaagcagattaaataccgttctgaaacctagctcttttctagtacctgctacatgtttcatagacgaatggtaaagcggcgcaaaaagaaatcccatgttgtttgtttcaatgctgcttttgaccttctcgggagtggtttgaatagaaacctctagctcctctaaaacatcagcgcttccgcttttagaagagacagagcgattgccatgcttagcgattttcgcgccagctgccgaggcaacaattgccgaggcagttgagatattaaaagtggaaataccgtctccccctgttccgcatgtatcaacaatatcaggaagtccatcgactgtaagagcgtgtgcccgcattgccttcacaaaacccgcaagctcttctggcgtctccccccgatgagcaagaatagacaatataccacccatttccgaaggagtcatttccgctgccatcatcatattcatcaacgtttcagcctcaccggcagtaaggttttttccgtcaacgcacaattgaagaaatttgttcatcagctttatcctccttgctatgaaacatgtcttctgcaatatgaatcgttttcagcagcgcaccggctttattacagctttcttcgtattcggcttctggaacagaatcagcaacaatgccagcacctgcctgtatcgatgcaacgccgttctttacactcatcgtgcgaatcgtaatacaagagtcgatattcccgtcaaacccaatgtaggcaatacaccctccgtatgtctctctcggtgttggctcgagctcttgcaaaagctgcatggcacggattttgggtgcgcctgttaaagtccccgccgggaaagcagacatcagtgcatcgacaggatgaaccccttttttcaatcggcctgtaaccaccgagataatgtgcatgacatgtgaaaaggagacaatttttgtgaactccggcacagaaacagaaccatactctgctactctgccgatatcgtttcgggcaagatcaacgagcatgtaatgctccgccttttctttttcatccttcatcagctcaaccttcagtctctcatcttcagctttgtctgcgccgcgttttctcgtaccggcaatcggatggatttctaagtgcccgtcttgaacgtgtattaaccgttccggagagctgccgactatttctctgtctagcagtttcatataatacatatacggcgaaggattgacgatcctaagcactcggtataactcaaaagcatctgcttttatcggcacctcaaatttttgtgataaaacaccctggaagatatctcctgcttttatatagcttttgattttttctacatcagccataaaagccgatttttcataattagaagataccgtctcaaagctgggtgtcttgtatgaatcagcagagagaaacagctcttttatttttttttggtccatcattttttcgatgagattttggagctccaaatgattttgatggaatacatccattttttcgttttctgtttcctctccagtgagccttgcatattggataaagtggacgtttttggtttcatgatcatacgcaattaatgtccggcaaacaaacagcatgcacttttccatgtctgtttcttttgtatgcgaaggaacagaaggctcaatcagcgggatcatatcatagcttaagtacccgacagctccgccgacaaaaggaatgccaagctgaggtgttttgattttgtatgtggtattcatccagttcagcacttcttttagttcatttcctgtgtaaagagatttgctgtcctgatcagcggccgaaaaacggccctgctcttctttaattgtgagaaatggatgcaggccgataaatgaatatctggaccaagtggatgtatcgtcctggctttcaagaagatacgtaatctccctgtcaagcttctctatcatttgaatgggtgtcagtgtatcgactgtgaaggtctccacaatcggtatcgtgtggtgggacaagctgtcctctaaaaatgcggaaatgtttgattggaaattcattactctcactccttatggcaaggagaatgagaagatggcatgagaggataaaatactatataacaaataaacccaaaagaaagacttcttttgggtagaataaacataatgtctcagctcaactaaactcattctctgctaccctattctctaactcaactcattctaattgctttatacacactcttgtgtatttctaagctgttcttatcgtattacaattcagtattttttgtcaatgataaatcgggcctcaatacgacggctttttctaaatatacatgtctgatctgatcctgagggacatctgtctggaccgtcatcatgactcttatgcactttttcagaccgcctgttacgtccatttcctgcatacatgttaccggtacatactgccatcctgaaagctcgcgaacagcttttgccgggaaaacagcgtgcaaatcaggtgtagccgacagaagcatttgaacaacatcttccggttttgtatgattttcttctatgattttctctaacagctgtttagttttttgtaaaatttcttcttcagtatcccgttcaactgtagttgctccgcgaattccgcgaatcatcatgatgtctcctccaatcgccatttgttcagccagctctcaagttcatttctggaaaatgtatgatcagcaactttccctaattcgttgagcacaataaactgaatcttcccgccacgggttttcttatcattcatcatacggtccaagagaaccgaagtttccgtctcttttctgatttgacttggataacccaggctttttagccagctgaccaaacgttttctgtccatttcacagcctacagtcttttcgcttatatataaagcaaactgcattccgagggctacggcatcaccgtgagtgatctgcccgtatccatattccgcctcaacggcatgaccgagcgtatgcccgaagtttaagtaagctcttatcccctcttctttttcatcctgctgaacgacagacgctttaattgaaatgcctttaaaaatcatgtcattcagctgatcattagtgatatcacgcagtgagtggatattcagcaactcctccagaaacgctctgtcatagataaaagcgtgtttaatcacttctgccattccggacctaagctctttttcaggcagagaacgcaggaaatctgtatcatagagcacggctttcggctgataaaacgcaccgattagattttttccaagcggatggttcacggctacttttcctccgactgcgctgtcatgcgccaagagcgtcgtaggcatttggatgaaatcaatgccgcgcataaaagtggcagccacaaaaccggcaagatcccctacaacaccgccaccgaatgcgatgatgcatgaggagcgatccaaatgaaaacgaatcgcttcactctgcaattttgtgtacatgtccatggattttgcctgctctccactcggtaccgtcacttttttcacaggccatttatcttgcagcaaatggagcatttcatcaccatacaggcggtccacttcttcatccgtgacaagcataatccttgttaaaggcctgtttaaagaggttaatagttcgcaagccttttttctgataccttgtccgataaaaacaggatatgacgaggaagcagtttgaacatgcagtgtcttcattaaaattccctcgacagttttctcatattctccacattttctctaatgcggtcaatttgatctaatccgaattgttcaacgactgcgttcgcaatttcccaagcgacagccgcttcagcgactacacttgccgcaggaacagcacagctgtctgaacgttcaatgctggcagaaaacggttctttcgtttcaatatcgacacttttcagcggtttatacaaagtcggaatcggcttcatgactccgcggacaacgattggcatccctgtcgtcatgccgccttccagtccgccaagtctgttagtagcacgggtgtatcctttttcctcgtcccaaatgatctcgtcatggacttcgcttccatttcggcctgccgcctcaaatccgatcccgaattccacacctttaaatgcattaattgacagtacagcggcagcaagcttgctatccagtttgcggtcataatggacatagctgcccacgcctaccggcattccctcgacaatgacttctactattccgccgatggaatctccgtttgcctttgcttcatcaatggcagccatcatttttttgcctgcctcttcatcgtagcatctgacaggagactcttccgttacgcgctgcaggtcttcaattgacgtatattctgttttttcagctttaacagcgccaatttgcaacacgtggcccgccaccttaatgccaagctcagaaagaatctttttagctacagcccctgccgccactctgacagttgtttcccttgctgaagaccgctcaagcacatttctcatatcacgatgattatatttaattgcaccgtttaagtcagcgtgcccaggtctaggtctggaaatctggcgcttcatttccttttcttcatcttctgtaattggagcggcgcccatgatttttgtccaatgcttccaatcgttattttcaactacgagagcaattggtgaaccgagtgtacgtgcatggcgcaccccgctcataattttggcctggtctttttcgatctgcatgcggcgaccgcggccgtgtcctttttggcgtctggcaagctcaaaattgatatcttcctccgttatgtaaagcccggcaggtacaccctcaataatggttgtcagttgggggccgtgtgattctccggctgttaaatatctcatgacttcttctcccttcatcacattaacgcttttaagtaagactactataacatatttttcagcaaaaagtcagtctatcttttttgataaaagaatgtatcggctgggactaggccaaatttctcgggattgaagatttgctcggtgctgccgacaaaaagaactccattcttcttcaagctatgtgccatttttaaatacagctcttccttcgcgctttctgtaaaataaataaatacattgcggcacacgattaagtcaaagtcttgttcataacgatccgccagcaaattgtgctttttgaatgtaatattctttttgatttccgttttcacttcataacttctatttgcgttttgcgtaaaataacgatctttcacagatagcggcacttcctgtaaagaccgctcctgataaacgccttttttggctttttccaaagctttttcatcaatatccgtcgccaaaatctgatagcccggaagacctttttgctggtccaaaagcatggcaagcgtgtatggctcctcacccgttgagcaggcggcactccaaatctttaaaggcctagaggtcttgattaacggcagaattgcagtctcaagaacttcccatcttttataattacgataaaattctgaaacattgatcgtcattctgtccaatgtttcatttaagagagcttgatccttttccaatgccgccgcaaagtccttaaagctttggaacccctttttctcataaagtgacgttagccttctcttcatttgtgcttctttatatagtgtcaaatcgactccggttaattgtttccattttgttgtaaatacgctgtatgtatccatctctactctcccagtctcgctgtctttttgtcctagtatagcttgttttatcaggaaattgtattgtttcaataaaaaaatcagcttttcagctgattttagatcgttgggaaaggcagaggtctgatgcacactgccaatcaaccctttattcactttaatgtaaacctttacaaaacagatcaaaaaccggcggcgttatatgttgccggctctgttgcttattttcacaatgattaatagatccagcctgccataagctgctgatatgatactaattcttcattcttaaagaaaatgttaatctcgcgttctgcactttcgagagaatcagagccgtggatgatgttttttccgacaaacatgccataatccccacgaatcgtaccaggtaaagcttctttagggtttgttttcccgatcagctgtctcgtcacttcaatgacattttcgccttcccacaccattgcgaatacaggtcctgaagtaataaactcaacgagctctccgaagaaaggcttaccttgatgttcggcgtagtgtttctcagccatttgttcagtcactctcattaacttggcgccagctaattgtaagcccttacgttcgaatctagataaaatgtccccaatgagctgacgttggacaccgtctggtttcaccatgataaaagtcttttccatcatattctccaccccatcattatgtatgtataggctttcacactgcacaccgaaatcgtaacatctttctgataattaatcaatccggggcggagaaatttcttaatatctacaaaaattaaaattttcttttaccgatatattttgcgatggctgcaagagacgagcgtgcgcgccctcgaggaagcgtgtttaatttctgaaaagctttctgcagatacatttcgcttactgccatagatgcttcaattgcatctgtttttttgatttcttcaatgattggttcaagctgttcctgcgttgtctcactgttaatcaatttaagctggttttttaatgcaggatttttcagggcatacagcactggcaatgtgacgtttccttgaagcaaatctcctcctacgggtttacccagctcttcctcagttgaagtaaaatcaagaatatcatcaataatctgataagacatgccgacgtaatacccaaaccagtacaatgccttatgaatcttctcatcagctccagacgcaatggcaccaagctggcagctgaccgcgatcaagagagctgtttttcttttgatacggcggagatacgttctgagattttgttccatgttgtatttgtctttgatctgctcaatttcccctagacaaacttcaacgatcgtctgtgacaaaatcctatgggctttcggttcgttaattctcgtcatcatttcaagagatcccgcaagcatataatcgcctgtgtacatcgcaatacgattgtcccactttgctttgattgtcggttttcctcggcgaagctctgcatcatcaatgacatcatcatgaaccaaagatgccatgtgaatcatttccagagtgacggcgacatatttaatcttattaatatcgtaatcgccaaacatgccagaaagcagcacgaaaacaggccgaatacgtttccctccggcctgcagcaggtgaagacctgcctcgcttaaaagcgggtaatcggaacgtacggtttgttcaagttctctttcgattacatcaatatcgtcatttaaaaaagagtaggccattttaaatttcatatcattcacccaaacatctgtgttttcatttccatccgatatgcgtggcagcgactccgccagtaaacgaatgatatttaacatttttcaggcccgcctcttcaaacaggcctgccagttccttcattccagggaaatctctggctgattcttgaagccaagaatattctttatagctcttcgcaaacagtttcccgaaaaacggcataatatacttaaagtacataaagtaagcctgtctgaatccgaacatttccggctgggacgtttccagacataccacctgcccacccggcttcactacacgtctcatctctttcagtacagtcaagtaatcagggacattgcggagtccgaagccaatggtgacataatcaaatgtatcatcatcaaaaggaagctccatcgcatttccgtgcagcagttcaatttggctgaatccgccgtcttttactttctgctcgccgacactcagcatattttcactgaaatccaagcccttgatctcgccgcttttgccggccgcttttgcaagagcgatcgtccagtcagccgttccgcagcagacatcaagtgctgttgcgccttcttttacattcatgatgcgcatcgttttgtcgcgccattttttatgctgctgaaaactgatgacagagttcatttggtcatagtttttatatattttttcaaatactccgtgtacgcgctgttcttttgagtcctgcataatggtttacccttcttccactttctgatgataggtttgatcttggctgattgtcttcagacggtttattaaaatgttctgaataggtgaatttagaggcagaagtgactcaatgctgtttttcgcttttttaaaacaatcttctaatatctcttcttttgtttttcccagctgtataaaactcccgatcacatccagaaatgcatcatttccgttcataagccgcttaaatacaaaaaaatcactcgacagctttttccagcgcggaaggttgaagtgttccgccacacgatggaataaagctgattcaacgatgccgacactttcgaaaaaatcgttttcgtccttgaaagaacggtcatacagacgaattttatgttcgttgatttctttaatggctgtagcaagcgtccgaatcatgtagatatccttcatttcagatagtaaagagtagtacagcccgctgaaataatcgcccgcgagaacagtcaattggcggtttttgttttcgtctcgttttatgactctagctgtcgtcacttcatcatgggtatcaagggcgctttgtacaagcatcgctgttacaatataattttctctgtcgttgttttttatgtcagcttcttcaaataaagcatgaaaaagaagaagcttatcctcatcaattttcggcgcggaaatatgcttcgctaaataaggatgagacagcttttgttttaatttcttgttcagattggctaaagttccgtagatgtcttgcaaaaatatcacccttgtccccaaattcacatttatttcttaatctatgtatgagttttatcttttcattcgcttacgcaggtatcattatagcataaaaaaaagaaattggctgtatcctcccgctgtttgcgagcatttgcttttaacagcggggacagccagcttattttttttcgcttttcatttctccgtacgcggtttgaatcagtgcctctcctctgactttaatggcagaagtatgctctgtaaactgagcgatgatcacttctcccttgtcgagtttttcggaatggtgaaactttgtgtctgttcctcttgtcaggccgatcacattcactccgtcctcaacggctttaatgacgacaaaatcacttgaatgcttttggttcatttatagcaccctctatctttattagtcctggcgtttaatatgttccaatacttctgcacgggcagcggcatcatctttaaaaacgcctctgactgctgaagtcacagttttcgcacccggttttcttacaccgcgcatcgtcatgcacatgtgttccgcttcaaccactaccattacgccatgcggatcaagcgtttctacgatgctttctgcaattgtagaagtgatgcgttcctgaagctgcgggcgctttgcaacggcttcaacggcacgtgccagtttgctgagtcctgtgacctttccgcctcgcgggatatatgcaacatgtgcttttccataaaagggaacaaggtgatgctcacacatagaatgaaacgcgatatcttttacaagaacaagctcctcatggttttcaccgaagatagtctggaaatgttcttttggatcttcattcaagccggagaatacttcggcatacatctttgcgactcttttcggagtatcaagaagcccttctctattcgggtcttctccgatcgcttctaaaatttgacgaacagcttgttcgatttgctctttattaacttctttcatgttctatgtcctccaccaatgaatacatttaatttcgattctagcacatatgccccgctaaaagcaaagtgaatgccctgtcaggaagcccatgctcttgaaatatgaaaagccccttagaaaggggcttttctgtgaagaaataaagtgtatgtaagctagatgcatacacgatctatattcacaattattttccggcaactgcgtctttaagcgctttacctggtttgaaagcaggtactttgcttgctggaatttcgatttcttcacctgtttgaggattgcgtcctttacgtgcagaacgttcacgcacctcgaagttaccaaaaccgatcagttggattttatcaccgtttttaagtgcatctaagatcgtatcaaaaacagagtcaactgcttttgtagcgtcttttttagacaattcgcttgcttctgcaaccgcattgataagttctgttttgttcatgcctttcacctcctcccaaaaggatacattcagttcgtttattatcatttcttcacagttcagtctgattctaaacctgtctcagaaaaaaatgagagcaagtaagagaaagacaattaaacggctttttaagaaaaactgcactctgaggaatgtttgtccaacaaagtgaagaatttctgtatgtagagtaacacatataaaaagccatatcaagcattttaaagcgtcaatcccttgctcgtcaaggatttaaggtgatttaccgaacaaatattcctttttttccttttttcatcctattccttgatccttttccattattaagaacaaagaaaaaagacctcccattctataaagaggtctaccggtattacaggatgatggcgattaagccgccagagccttcgtttatgattctttctaatgtttcttttaatttataccgtgcgttttcaggcattaatgacagctttgcctgaatcccttctctcacaattgagctcagcgaccttccgaagatatcggaattccagatggagagcggatcatcctcaaagtcctgcattaaatagcgtacaagctcttcactttgtttttccgttccgataatcggggcgaattcgctttcgacatcgactttgatcatatggatcgacggagcgacagctttcagcctcacaccgaatcgtgagccctgccttataatttccggctcatcgagactcatatcagctaaagcaggcgctgcaatgccgtatcccgtctgtttgaccatttttaaggcatcagacacttgatcatattctgttttcgcatgggcgaagtcttgcatgagctcaagcagatggtctcttcctctgatttcgacgcccacaacttcttttaggatttgatcatatagatgatcaggcgcgtacaaatcaatttctgccaccccttggcccagctcaattccggctaatccggcactttcaatgaattcaaactcgctgaattggccgacaaccctgtctacgtcccggagccgtttaatatccttaaccgtttccttcacggactcctgatagctttcacgcagccaatggttttctttcagcaccattacccagcttgggagattgacattcacttctagcaccggaaactcgtagagggcctctctgagcacactcagcacatctgattcccgcatgctctctacactcattgccaataccgggatatcatatttttcgcttaaatcctggcgcatggcttccgtttccgggtgatacggcctgactgagttgatgaccataataaaaggtttgccaacctctttcagctcttcaatgactctttcttcagcctctatatagtcacttctggcgatatctccaatggtgccgtctgtcgtaatgacaactccgatggtcgagtgttcttgaatgacttttcgagtgccgatttcagcagcctcatgaaatgggatcggttcttcgtaccaaggcgtattgatcatccgcggcccgttttcatcttcgtatcctttagcgccgggcactgtgtaacctacacaatctactaatcttatattcacatcgagtccgtctgacacatgaacagacatcgcctgattcggaacaaatttaggctctgtagtcataatggttttgccggctgcgctctgcggcagttcatcctgcgctcgggcccggtctgcttcgttactgatattcgggagcaccacaagctccataaattttttaatgaacgtggattttcctgtacggacagcacctacgactcctaagtatatatcgcctcctgttcgttcagcgatatccttgaaaatatcgaccttttccaagtgatcccctcccggacttcctatccttttcaattttattaagctctttcaatcaaacacaggacactatatgtgtatgacgttgtcctatttgaatatgacatctttagaaaatttctcatcctcaatctattaaagtataaaaaaacctttctccctatttgtatgcaagggagaaaggttcattcctttttcatatcattttctaaaaaaacaggttcctgtttgtcatttaccgtatattttacagaaaacgcggggacaaagggggtatcctgccaaatcatatcctggatttcagtcccgggtttaaacgtttttttgctttttttgaggcaagaagccagctcagtccggtaatcggcatatatttctccgtctccgtcaatcataagcggcaaggaattccctgagattgggcttgtcactgtaagagagcttccatccccaagcttcttctcatcgagtgtaaataaatcacgagatagcacatccttgtaaggcggatattgatgctcctgacgatacatttggatgcgcaatttcacatcgcgaattttttctgccatctttagatcaattaatttaacagtcggatcgttctctacgtcaacaagcacgtattgatagtctcccccgctttcaaatgccgtacttggaggttcagctatgtatcttggcgctaaccggttaaagtctatcggatatttttgatatagcggtgtcgacatatctttggtttgaataggaagcagccctccatttgccttttgaaattcatcaacagcagattgaacctgctttagctggtcttgataaggaatggcatgcacactgcttttccgttcatttggatataaacatccggataaaaacacgactgccgcaaaaatgattgcgcacttcagtttacccatacagcacttccttttacagctttattcattgacagggccgctaaaaaccacgacaaacacaataattccagatatgagcatacacatgtatgcgaatgatgaaatcgcaatcttcaaaaaacggttttggcacttaaagcggcttaaatagatggaagctacagccagaaacatcagacccatggaccctagagcaaaccacattttcatcaatgccagattcaatgacgtgcgcctccccgatatgtatgatgtaagcgttatattatattttaatatacagcgccggaaaagatcaaccagattttccatccattgatagaacaaaaaaactgaagcaaagagggggaccttcgcttcagtcaacttgactatattcacctgcacgtttaagaaacactctcttggacttcgatgctatagtatgcgacttggcatacagatgcatcctctattgcctaaatcggcaaaatgtttcaggagatcccaagacttgggtgttcttctgtttttcgggctttcgttcaattaagatatgcgtttcatcataccattgacacttttacttcacttgattttcaaacgtatttaccaaatcctccatctcgtgggttttccctcttgccattaaagattcaacagcggtttccactttttgtccgttgaacaggacctgatggagagcttctgtaatcggcattttaacatcatatttcttcgaaagctgataagccgctttcgtcgtgcggacgccttcgactaccattcccatctcttcaagaacatcttcaagcttgtacccttttccgagcaaattgcccgcacgccagtttctggaatgaacacttgtgcacgtcacaatcagatcgcctactcctgtcaatccagagaacgtcaagggatttccgcccattttcgttccgagtctcgcgatttcggcaagtccgcgtgtaatcaaagcagctttggcattgtcgccgtaccctaaaccatctgtaattcctgcagcaagggcaataatattttttaaagcccctccgatttcaactccgataatgtcaggatttgtgtacacccgaaaattgtgattaataaatagatcctgcacctcttctgctgccctcatgctctttgaagatgcagtaacagttgtggggtgccgcagccctacttcttccgcatgactcgggccggaaaggacaacgatatcttttctgacatcactcgggagctcaatttccataatttcagaaatgcgcagaagtgaatctggctcaatacccttgctgacatgaacaaagactgcctttttcgttataaaagggacagcctgtctcagcacttcccgaattgcttttgtcgggaccgcaacgataatgaaatctgcgtctgaaacagcctctttcatatctgttgttcctttaatggatgtagacagcttaacattcggcaaataatctttgttttcatgcaactcattaatttgatgaattaaatctgcacggtgagcccacacacacacttcatttccattatcagttagaactaaagccagtgctgttccccaactccctgctccaagcattgtgacttttttcatgtttgattcacacctttttattttctagctcttgcaaatattttgattggtgtcccctcaaaaccgaacgcgtctctgattcggttttctaaaaaccgttcgtatgaaaaatgcatcaattccggatcgtttacaaacacaacgaagcttggcggctttaccgacacttgagtcgcatagtaaatcttcaaacgagaaccgttatgagtcggtgtcggattcattgccacagcatccatgatgacatcatttaagacgttcgtctgaactcgaagtgaatgattttcacttgctttaataatcgcaggcatcagcgtatggatccgttttttcgttaaggcagacataaataggattggcgcataatccagaaattgaaaatgatcgcgaatattttcttcaaattctttcatcgtgctctcatctttgtcaacagcatcccatttgtttacgacgatgacgacggccttgcccgcttcgtgtgcatagccggcgatgcgcttatcctgttcaataatgccttcttcgccatccagcacaaccgccacgacttctgagcggtcaatcgctttcagcgcccgcagtacactatacttctcagtcgtttcatagacttttcctttttttcgcatacctgcagtatcgacaatgacaaactcctgctggttgtaagtaaatgacgtatcaacagcatctcttgtcgttccagccacgttgctgacaataacgcgttcttcgccgagcatcgcattcacaagtgaggactttccgacatttggacgtccgatcagacagaattgaataacttcttcattgtatttcgtttcaggaatgtttttaaaatgctctgcaacggcatccagtaaatcacccagtccgagtccgtgtgttcccgaaattggatatggctcgccaaagcctagcgaataaaaatcataaatattcgctctcatttctgtgttatccagtttattaaccgctaaaacaacaggcttttttgtgcggtacaaaattttcgccacttcttcatcagcagctgtcacaccttcacggccgttcaccataaaaataatcacgtccgcttcatccatggcgatttcagcctgctggcgaatctgcgctaagaacggctcatcaccgatatcaataccgcccgtatcaatcaaattaaaatcataattcagccattcagccgagctgtatatccgatcccttgtcacgccaggggtatcttctactattgaaattctttctcccgcaatccggttaaagattgtggattttcctacatttggtctcccgacaatggctacgacaggtttacccatagtacccttcctttcaatccagccgctttcatttttacataaattttcaaccggttattaaattcatttcattcacttttatgaaaagaaacccttcagaggaagggcttaactcatttattatatcagtttttactgggatcacaactattcttaaaaatgtttcacgatcaaatacacgtcatctccgattctgtgagctattccatcaaggatcgcctcaagatttttagcgaaaagctccatctccttttggtcattgcaaaaaaagacaggtgctccccctgcaacccggtttggatttgtcgtgattacagacaaaatcactttcgtaagagattcactcatcctatcaccttatcctgattcttgataaattcagtcggcattctaatcgcattttccaaggttggaacattgctaataatttgaacagccgtttcgggatggtgaatttgcgggagaacaaatactgccactctcccatcatttaaatcccgttttgcaattggtgtcaaagatggctctcctgaatcccgataaaccccgagcacattggaaacatcaaataaaatggcctgacgctgccctaaatttgctatcgtcgctgctgaattaaagtttttcggcgttaaaataaagcccatgccatgctttaaaatcagttcctgtttctctggaagcccgatattcatcatataaatattatcaacaaacagtcccggaccgtcaaagcgcggctttatgtactcgatgtctacaatatccttcaacacactgcccgacataaatttcatggccagtaaaaaacaaacgacagccgctatgacagcagcccagatggataaaaacacatacgcagaggttgtcaaaagcgctgtaaagatcacaatataatttctgctttcaaacgcaatggcaatcccctcaatatatgtgctaccccttgagacaagttcatacgaatccatttgcgtcaatgtgttccgctccatgtttcggacatctctaaattgcgtcgctgccaatgttaaaaatgtgatggccgtaaattcctcctgcaaaagcgccggcataataattgcacctaaaccagccgctatcaaccccagtgcgatgtgaatcactttcccatgaacataggtcggatactggcggtaatccgttttcagcatataaagccttgtcgcaattccggcaatgaccccaacaataatcggatagatgtaatcactcatgacattttggtagctcctttgtttgatcttttgcttttctgaccaatctggcttgcgaggtattcgtatttagatatgccaaacagcaatatcatccccgcagaacacgcattcagccattgaaagccgccgacagccatagccccggccaacttctggatcacaaatgaatacaccagttcgccttggcacatccctaggacaaataagacaagctgcttctcaaaattcctatcaacagaagctgttaaaagcactattaatataacagcagcccactcaggttttatgatgaaccaaaccgggtcatataatgcaaaaagataaacaaacgcatacgcggaaacaagcgtcagatagaccatgatgtaacgaaaacgatacattcccaaatacccggcatagacacatccgcaaacgaaaaacatcaaatatgcagcattcagggaaaaatataaagcgatgtcatgtatgcttagaataatattagttaaaataaagacagagacggcaattcgtcttttcgtcttttcaaaaataaatgttgtcagaacccacagaaaccacattgaccaatagtaataaaattgttccattttacttcctccatattcccagtatggagttcaagcacattttttaaacaatcgatctcatattaaggagtatgatcatgggaaaagacagacaagagaaaaaactcaaagcttcaggcagagtcgaatcagaccgcgaccagtccattcactatgacggagcgacaagccttgaacaaaacggaagattcaaaaagcgaaaatcataatacaaaaagcccaaaccacatatggttttgggcttttatcatttatcgcacactatagcttgatgtattgatccctctctctgtgagccaatgatgggtttcacctttgatcacaaggggcgccttttgtaaatcggcaatcgttctggtgcccagcacggtcataatcatctttaattcctcaaggatcagctgaatctcctcaagcagtccttcctcaccgctgtcagtcagggcttttaaaaaatgccctgccattccggtgcaagaggccccaagcgcaatggcctttgccacatcaagtgcatcttgcagaccaccagaagcgatcatggtgcttgcaggaaactcggagcggatttccgccaaacttgcagcggtcgaaatgccccacgagttaaaaaaggagatttgccgctgtcttcggagattttcgattttcgagaaatttgttcccccgtaaccgccaatgtcaacagctgcagcaccagcttcatacagctttcctgctgattctttgctcataccgaatccgacttctttcacaatgactggtacgctgacatgactgcaaatttgttcaatgcgttccagtgcgccgctaaagcttctgtctccttcaggcatcacaatttcctgaatcacattgaggtggatctgcagtgcgtttgccccaatcatctcaacggcttcctttgcctgggcagccgttgcctcgcttcccaggttggcaaaaatcagcccgtttgggttttcctttcgaacaatttcataggaaagacgctctgatggatcttttaatgctgacatttgcgatcccacagcaaggggaattccagcctgagaagccgctcgcgcaagcgatttattaatctcatatgtaagttttccaccgccgccagtcattgcattgataaaaatcggcgaactgcttgaaagttcgccgatttttgtggaaatatctacttgttctaatgcaagatcgggcagactgacgtgaacaaacgtaatatcatcaagacctgtttcccgcttctggccggtggacaaggcatgattgatgtgttgtctttttcgttctgctcgagtcacgtttatcaccaattattttagtttattcagcttatctccgatcagatctccaagctggaagccagtgcttgtttcttccttcgcttgatattgacggtaatcttcctgatcagctttaggcgtttcttcaagttcacgcatgcttaatgaaatgcgctcctcattttcattcacatcaagaaccttcacttttacagtctgtccttcttcaaggacttcatgcggcgtgccgatgtgtttattggaaatttgagaaatatgaacgagaccttcaacacctggaaggatttcaacaaaggcaccgaagcttacaagacgctgtacagttccttcaagcacatcgccaggcttcactttttcgccgatttggctccaaggtccaggcagtgtatctttgattgataaagaaatacgttcgttgtcacggtcaaccgataacactttcacttttacttcttgtccctcttcaacaacgtcagacggtttctctacatgagagtgggaaagctgtgaaatgtgtacaagtccgtcgatgccgccgatatcaacaaatgcgccaaagtcagtcaggcgctgtactttgccatcaagtacacttccaacttcaagagactgaagaagttcttgttttttattcgcttgctcactttcaacaacagcacggtgtgaaaggatcacgcggtttttatcacggtcaagctctacaacgagcagtgacagtgtttttcctttatagtcagtgaagtcttcaacgaaatgtgcttcaacaagtgatgccggaataaaaccgcgaacgccgatatcaacgacaaggccgcctttcacgacatctttcacttcagcttcaaacacttcttttgtttcaaattttttctcaaggtcttcccaagcgcggtctgcatcaacagcacgtttagataaaatcaaagcatcgtcttccacttttgttactttcaggtcaagctcgtcgtctactttaacaacatccgatgctttctctacatgaagacttgataattcactgattggaataataccggattgtttgacattgatgatttctacatctacatgtttgtcttctacctttgtcacaatccctttaactacatctccaacctctggcacttgaacatcaatttgattcatttcctctgtcatttgaataacctccttggtccaaacctacacagcttaattaaaacggtttgaaagctgaacatataacatgcccgcttttagccgaatatgtattaaagaatcatccaaaaaagttttttgaatgatcaataaaaagttttattagtattaacttctaataaaaggacaggtttgtcaagcaataacattctatcttcgttgaaaaattcaaaaaaagtggcatttgccatcctcagcgggacttttgctccacagcctcgaggattttatcagctacctcttgaatggaaagcgatgtcgtgtcgatttcaagagcgtcttctgctttacgcaacggagatacttcgcgctctgaatcaagcttgtctcttcttgcaatttcctcaattaatgtttcgaagttgacatcaaagccttttttcacattttcttcataacgacgtttcgctctctcttcaacagatgccaaaagaaagatttttacttctgcatttggcagcacatgcgtcccgatgtcacgaccatccatgacgacgccgcctttttccccaagctgctgctggcgtttcaccatctcttctctgacacttctgtgcttggccgcaattgaaacttggttgctgacttcatctgttctgatcgcctcagttacatcggtgccgtttacaagcactttttgtccatcttttgttgtaatcagctcaatgtctgtccgctttagcagctcagccagtttttcttcatctgtcagatcaacgttttcctgtaaagccgcgtacgtaatcgcccgatacatcgctcctgtatcaatatatatgtacgattttttctcagccacaattttggcaacggtgcttttccccgcagctgccgggccgtcgattgcaatcgataatttcttttccataattcctctccttgctcttttctcctctatggattgtatcacgaactttatgaaaaagggtgaaaaattgatgaataattaatgtttgaaggtttcaatcctattgttttcctccattttatccaccccttcatattgaatcacttttgatacgtatggttcaatatgctgatagtgaaaaagaaattggacaccaagtaaaatgatggcctgaatgaacaataatttgatcagcagccgttcaaatgttttcattggagcacctccattacaaatagtatggaagtgtttgccgatgtttattccattcgggcctttcttctcttatttaactggcgcctgatgcagtattgaagcaaagcctgctggtcacctgctgcaatttctgaatactctaaagtcatttttcgtttttctgacttggggtcattaaagattcgtctgacaactgcttctgtttctatttgacgtgtgtgctcctcttcaggaagacggatgatcaggcgcaatgattcccccgattgaaaagaaaggccatcagctaaaaccacggcgatgccgcctgcactgatgttataagatagtgtgcggatctcttcctcatttcccggctgaatttgcacatctaataccgcatcagttcttacatattggcggcgctggattcttttcattttttcacggggaggcacttcaagacagatcatttgaagtttgtccttcactttaccttttatacggcttataaagcgataaggaacttcgtcttttcccacaaactctaccgttacttccatatcgttatgtaaaatcacagttcgccctgtaactacatcaacaggatacgcgatcaaaagttcattgttttcgatgctgaccgccttgctttttgcctttttcaattcattttcttctatatattctaaaagtacagtttctccaatctctatcattgacttcactctttcgcattcaatatactcacgtttttattaaagcacgtaatgaaaaaaaggaaaagacatttagtcctttcctcctgttttttataggtctttatatataggttctgcattttttagtttttcaaccttttcttccgatccgtctttggcattgatatacattctgaaagtgtcattttcaattgttccaagcatttcgtaacataacacttcttgacctagttcatttgtaatcaaagcgagccttgtttctctcacttgtacatttttatttaatttagactttgcctctgcttcagtaattgcaggcttaggtatggttctttttctgtgagatgtgaggaagtctcttgctgaaaagccgacaacctcaccgtcatccaaggccactttcatacgaattgcctccgggtacatccggactttattttcaacaggaacatatgaaaatacaccgattttatcatattgggcactttcatcaatttccaaatcatctgtttcaaatccgtttttctttaaaaatgcaagcgctcggttcgatccgtcatttaaactgattttctgatctttcacttccctgttttggatcaagtataccggatgcccgcccttcttcgtaatatccatataaatcactgctttatggtctgggtctttcatgctgatgctatatacatcgcgatttgttttttttccgctctttaccactttaattgaataattgtcatctggggcaaagcgctcagcaatttgttttgcttcctgttcggaaatttgttttcccttcagatggctgaagcctttctcttcttttttcgtactggtgaagctcgggccaagatcagtgccagtggagaatgcaccaacatttttttcgactgttttaaagctgttgataatcgtattatcactttgtttttcgtcagaagccagggccatttctacgtccatccagcgaaggtttttgctcatgacaaggtgctgaacatgacgcaattcattttgtatatcttcggactgctgatatagcttatttagtgatgtatactcgtttttatcaagcggcttttggtccaaatctctgactgacgttttatagctgaaatcgccgatctttgataatagctcttcagttttattaaacggcattaatgtaagcggcagctgactgacactgttatgagcttctgatgtaatcctccacacatcgatcaatgcaggcgacagtgatttttggctgttcatggcaagtgttgttccgattttatcatgaagctgatccatctgataggtaagctcatgaaacgcccgctgatagttattttcagcatgaagaagaactgcgtctttttcctggtgttctttgtatccccagtagcctgtaccgactattgcaataccaagcacggcgattaaaattcctctgatcatttatcacacctctttttatgctttctcatatctgctactcacagaaaatgtgtttaccgattcttttaatctgcggacgcccccaaatccacggacttgtagccgtatccggattaaagtagtaaagtgcttcccctgatgggtcccagccattgatggcatccagcactgcttctcgtgccgtttcattcggctgcatgtaaatttgtccgtcggctactgctgtgaaggcaagcggctcaaaaataacccccgctactgaatttggaaataacgggctgttcaaacggtttaaaatgactgctgcaatagcaacctgcccctcgtacggctcgccccgggcttcgccataaaccgcttgagcaagcagcctgatatcgttgttggaaaatccaccaggcatgttcgctgctaccgcatcctgttttcttgcttttgctggtgtattgttttgctgtttattcgcattcgctttaggctgctgcgttgttttttccgcaggctgtttctgccgtgcttctgcttgttgtcttgccttttgtgttgctgcttttgatggtttcgtctgatactttagcggaatttttccgtaatgcgtgaatgtattccctttattgagctgttccatgacatattcacgatagtattttgatttacatattaaggtttgctttgttttagctcctacaaggccgtcaacctcttttaacccgaattgatcctgaaaatttcgaactgcccagtacgtcccccatccataaaccccgtcaatttttccgttataatatccgttgtattgaagacgcgcctgaagctcgaccacatcatccccggttgcccctctttgaatgacctgattcgaaaaggcagagatcgtttcagtattaataaacgccgttattgtaaaggaaaaaaggatgagacatgccataatcgatcctttggacttcatcttttcaagcctcctactgcaaatttttaagtgtaatcgtattttctgtaacgaggttatttttatacactctttccttgttatccctcagaacataaaaactgcacacaaaaaagccgcacggttgctgtgcggcttctatacttgcatcatattaacggaacgggcttttttcgctttacgcaaaccaaaccaccataaaaataccataaatggaagcatataataaatccaattgctaagcgctgttaggataaaatcatatgatccatgcaaaagggatgggaccactaaagaaagagtaagccactttacacgcgccttatcagcggaaaaacgggcttttccaaggtaaaatcccattataacgccaatcaaggcatggcatgaaacaggcagcagcgccctgacaaacgcatgctccacgccgtggccaattaaataaagaatattttcgagggttgcaaaaccgagtgatacacttgtaccgtacacaatcccgtcataatgctcatcaaagtgggcgtgcgggtaaacactgatcatcagtataaaccattttaatgattcctccaaaaaccccgaagataaaaaagaaacgaaaaagcttccgcctcctacattctctttttcaagtacatactggataaacattatgggaaatacaagaacaaccccgagaaaaaacgaccgtagcaccatatgtacaggttcattatcatactgatcttttaaataaaaataacttaataacgcgatgccgggggcaattcctgcagagatgattgcaaacatcaggcaacctctttcctttatattcctacgtctatcctaccatgttgtttaaaattttacatctgtctgcacttaaaaaaacataaagagcatacgaatgcatcatatgctcctcatctttaatggttttctcttttggcgatttccgctgcgatatgcccccgtgaaacctgccgttttcaataaatatttcatttgcattgtttcccgcagcaataacaccggcaataaagacaccttcaacgttcgtttccatcgtttcttcgttgaaatatggacgccctgtttctttatcaatttcaacaccaattttttcaagaaattgatgatcaggatgatagcctgtcatggcaaatacaaaatcatttttaatggtaatgagttctttctctccggagcgaaacacaacttcatcctcggtgattttttcgacacaagcgccaaattccatacggattgtaccgtttctgacgagagcttcaaattccggcagaatccacggcttaatgcttggagaatactcattgcccctatataaaactgtgacacgcgccccagatttcacgagttcaagggcggcgtccacgcttgaatttttcccgccgatgacaacaacatctttatcaaaatacgggtggccttctttaaaataatgaaatactttcggcaaatcctcaccgggtatattcatatagtttggatgatcataatagcctgtggcgatgatacaatatggcgtcgtgtaggtctcttttgacgtctcaataacgaatgtgtttttttgcgttttcgtcactttatgcaccatttcaaacgcattaacacggatgtttttccgtttaacgacttcccggtaatacgataaagcctggattctgacaggcttcctgttctctgtaataaatgccacatctccgatttcgagcttttcacttgagctgaaaaaggtttgatgcgtcggataattgtaaatactgttaacgacattgcctttttcaatgacgagggcatcaatgccaatttgttttaggtgtatggcagcagatagtccacaaggtcctccgcctataataattgctttttcttgaatcatttctgtcaactcctgcgattggcatttcacttcatattttctatttccgaataaaaaaatctcctattttatcataggagattttttatttttatgcaaatcatcaacttatatccagcctctaaaacgcgaagcttcagccattttgcgaacgccgaccatatatgcagcgagcctcatgtcaattcttcggttgttagccatttcgtaaatattgttaaatgatttgaccatcattttttctaatttttcttctacctcttcttcactccagtagaagccttggttattctgaacccattcaaaataagaaactgttacgccaccggcacttgccagcacgtctggtacaagcagaatgtcccggtctgaaagaatttttgttccttcaagcgttgttggtccattcgctgcttcaacgacaattttagcccggatattatgggcattttcttctgtaatttgattttcaatcgcagcaggaacgagaatatcacaatccagctccagcagctcttggttggtaatggtatcgttgaaaagctttgttacagtaccgaagctgtcgcgtcggtcgagtaaataatcgatatcaaggccttccggatcataaagtccgccatacgcatctgagatgccgacaacttttgcccccgcatcatgcataaattttgccaaatagcttcccgcgtttccgaagccttggacaacgacacgcgcacctttaatatcgatgcctctcttcttagccgcttctttaatacagatggtaacaccttttgctgtcgcagattctctcccgtgagatccgccaagcacaagcggtttgcctgtaataaatccaggcgaattaaattcatcaattcttgaatactcatccatcatccaagccatgatttgtgagtttgtaaatacatccggtgccggcacgtcttttgtcgggccgacaatttggctgattgctctgacataccctctgctcagacgctccagctctctaaacgacatatcccttggatcacaaacaattccgcctttaccaccgccatatggaagatcaattatgccgcattttaaactcatccaaattgaaagcgccttcacctctttttctgttacgttcgggtgaaaacgtatcccgcctttcgttggaccgacagagtcattgtgctgcgcacgatatcctgtgaaaatctttactgaaccgtcgtccatacgaacaggtatttttaccgttaataatctcatcggctcttttaacaattcgtatacctcttcgggatatcccaatttttccagagccttatgtattacggtttgggttgattttaatacatcaagtttgtcctcttctgtatgaccggtgtttcgatcggctgccatttgagttaacctcctagaatcttctgtttctcacatgctccctttcagagaatagtatacaccttcatatgatctgtgcatagaataaacgttatgtttttccatgttttttaacgaaaaaaaactgctgaaatcagcagttttccgttgcattcttatgaaaaatgagtttgtatcgtctctacggcattaccgtccataatgagcttaccatactcttgcaggcgataaatcgttaaagttgtcggattgccgtattcagccagaaccgccacaaccccttcagccgtatgtgaccctagatcttcaaggcttaaaaagtactgcccgtcatagtggtagacagttccccctgtgataccgattcgctgtaagctttctgaaagctgaatgatatcttcaaaggaatggaattgatatatgatgtccgcgctttcatcaagcttgacttgcatttcgatgtaatcatcatcatactcatcgtcttctgaatcggcgtcttggttctttgttacaatcacgaccatcccttgtgcttggagagaatacacttccactgcaatcggtccattcgcttcaaagccgagctctgtatttgcttcattcatcatatctttaaataactggtggactttgaatgagtccttccagaggtcttcttttgtcaatccccggtctgtcaaatcatcgagggttaaaaagattttgatcttattataattcagacgctcaagccgcataacgttccctcctgcctctacttgcacacaaatcatataacacattatatgagatgatgagtcataggttcttaattgttatcagtttacactgagttcactagtaagacaagcacaatgcagtttttattgccatatggatttttgctttttagaagttattctggcccgcaaagagtcacaatgtgtgtttcaggctcagcacctaaacgaagaggcacttttgtcgtgccgtagccgttgctgatcagatatgccgcgtttttaacaatacctgttttccccagttcataaggaccgaattttccaaacctgatctggcctccatgggtatgtccgctgagtatcacatcaataccgtcatcttcattgatttgttcatgaatctccggattatggcaaaccagaatattcagctggctttcatcaagttctttgatggcttcttcataatgatccatctccatcctgatatcatcaacccccgcaatcgcaatcgtatgcccattgtatgaaaacgggactgactcatttctcagagtgatgacgccgtgcgctttaaatatggaatacagcttatgctgcctgacttcataatcattattcccccacacaaacacgatagggaccccgaaatgtacgagccttttgatgttttcctcgattctcgcactgggcaccccgccctcagctaaatcaccgccgattataaccaagtggggggcatggcttcgcgctttttctaaaaggtcttgatcgatgagacgtttgtgaatgtctgaaataaaaaagattgtcagaggcggcttgcccttcatctttgataaaggaaacgtatgtgtcttcaaatgattgccttttgctgttgcatacatttttgccgtcattgccgctgccgcaacagttagtacaccggcaattttcactgatagcttcataaaaaaactctccattctttttagaacttatcaataagacggacaataaaaaaaagacgtttctatcgtttgagaaaacgccccattttatttactttcaaaatatagattaatgtcatatttgtgcttcatcatatgaaaaacagactctctcgccttccatttatcgggctgcggccagagatcagtgcttttctgaataatttcacatctcagtttatggaaatcagtctcggatttttcttcctttttcttgaaataatatgaagtacagtaggcaaaagcggttgccagcatccaaaataaataaaaggtatggctaagtatttcttgaagtataagctgaggctccgggcttttgatcatgatcataacacataataagcctaggcagataagtgaagcccatcgccatctgcggcattgtgctgcataattttcgaatttttgttttcgttttaccagcgcttggagcatctgtttggtcggcgcgtctgtaaactgatccagctgattccataaggattccatacgcttcacaccttgtccattttcattgctacaatatatgaacgtaaaataaaaataataccctattcatccattaaggggatgtccaaaacttgtccggtgtaaacatcatttccattcagatgattatacgctcgaattttttcttctcctgtccggcttttataatacttcatggaaatgcggtatagcgtttctttcttttggacggtgtgcttgacaacgcgattcggcacattttgaactggctcagctggctgttcttgctgttgtactgttgattgggaagaggaagcagccgcggcggttgcttcctccttatttgccgagtcttctttatccgctacagcagtctgtttcttatcagcagctgtttttgccggctcttttggcttggaatcttcaggctcttgttttgactccttctgcagtgcggtttctttagtgtctgcggtatcgtttttatcctctgatttcgggacaacctcatatttgctttggctgctgtcaataaaaacatcttcataatcgtcatgattatccgggtggctctttagataaaataaggtgactaaaacgataaccggcacaaatacaaatattactgcgagtactgtgaataatggcgtttttgttttgccttgcttttttttctgttctctttgattttttacagattgtcttgtcggaaggctttctccatcatcgacataatcgtccgccaatgcggcgttttgatcttcataaagattctgggcttttcttctctctactctcgacatgttcgtcatgtttatccctcctcacatgttcaaaacgaatctgacaggcaaacacggcatcaatgataaaatgcgccgtcatcggaacaaataagttgccggtccattcatacatcagaccgagcaaaaagctgattgctgtcaccataataaataacagccattttgacaaataccgaaagtgcagagcggcaaatataaggctggccgcccataaaccgatatgagtctgcagcactcctctgaataacatttcttccgcgaaagcaatcagaagcgttaaaaatataatatgagggattgacctcttactgaatatttttttattgattccgccgtcatcatataaatgagacggaaaccatttcattactgccatatcggctaaaataacaataacagctatagaaacaccataccagatgattcgcatatcgcgaatgtcccagagctttaatacgtcccgtacatcctcaaaaaagaacagtcctgctgcagcagcggcaaagatgatgagtagctgcgtcaaatataactgcttcagcatatcacggtcagacatatgctgaatataatctttttgctgtttcagttcagctcacctacagtctgcaagctgaatatccggtgcaattccgaactccagctgtctaatggcgccattttactccgttcccctttttgttcatacaaggataaatcaaaaccgcaatgtgaacagcacgggaggtttccgtcatcaggctcgtatgattcatcaaagtaggttaatagtgcctgccttaaacagccatcacgctgaagcaaaaatgatacacggtgcattttttccagcttcagctccatgcgatatgaaatttctttcttcatcagttcaactgatgttttcccctgcataaagagatgaatcatcatacgggcctgtgtctctccgacgccatactgaagtaatacgtcacgaagccttctctcatcccgctcctccgtcttctctagcacacggatcacgtcggcgatttcttcagctgtgacactctccatctggataatctgttcctgcaattcaaaatcccctggcgcccgcagcaaaatgctgacactcggctttccgtcgcggcccgctctgccgatttcctgcataaaagcttctgccgtctgcgggaggtgaaaatgaatcacatatctgatatcgggtttatcgacacccattccaaacgcattcgtacaacatatcacatcaagctggttatgaataaactgctgctgaattaaaatccggtcccctgactccaaaccgccatggtaaaagtcggctctgctgctcgttttgctattaatttcacccgctaattcctcggcccatttccgtgtcggacaataaacaattcccgggccttgcagattttcaaccagctgaatgaccctatctattttttcggcagtatccgccgcattttcaaccctcagtgcgatgtttgggcggttgactgagttgagatggcgtacagcatgctgcagctccagcaggttcatgacatcttgcagcgtttcctttgtagccgtggcggtcaatgccagaacgggcgggtgaccaagtttttttctcagctgcccgagctttgaataatcaggcctgaagtcgtgtccccattcagaaatacaatgcgcttcgtcaataacaaataggctgatcgggacgcttttcaatttttccaatacatatggagactgtaaagcttcaggagacaagtacaaaaatttatatcgatgaatatgttctaaaacaaattgtctttcctgcctgttaagcatgctgttcaaagctgcagcacgcttttccccccgggctttgagctgctgcacctgatcctccattaaagaaagcagtggagaaacgattaataccatgccgtcaagcatataaccaggcagctggtagcaaagcgatttccctcccccagtcgggagcattgcaatggtatccttcccgctgagtatgctttcaataatgtcctgctgcccttttttaaaggaagtaaaaccaaaaaactgatataacgtttgctgtaatttagtcatattgctgcacctgctttgtcaatgccagtctgatttgaaagtagctgaaccgctgttccagcccgtcgcgaatttgtttgattttattcgtccgcatccgtttggcaaactctgcgatttgaagctggtcttctgctgatacatagtcattaatcataaacgcaggctcatggagagaaatctcgacaatgtggtcttcaatcgtcgctgttttcagctttctgatttcagcaattcgctgtatcggaaacccttgtttgaccatctgccatgttttcctcgtcgactctgtcagggcattatctaagtgcacatcagaaaggagatcctttaacaaagcatcttcacactccggaagagaatgaataaaataatgtaccgaagcccaaaacatgatatagacataccattcgtcttctttcagcgtatcagcaagctgcctgctcgtataaccgatccgatggtgcgaggttaaggagtagacaaaaatttgcgctgctttgttttcaatctttttcaaatgcgcctcaagcatggcaaaaaggctttttgccatctctatatgatccgtatgccgggacaggtatttctttacccagtgaagtgtcttatgatcctttgtgacagggatatactgcctgctcccttgctgtttatgggataggacctgcacaagcagcgaaagccttttccaaagcacgccggcagcctgctgataatgagcgccgtgacaatgaacgggccaaggccgctcgctaagggcatgtctcaaaactgctgcgccgctggctgtcactttgtatgtatctgattcagacattggcgcgagatatgaatgcttttcaagcttgtcaagcgacgcagaaatatcgcttctcgaacattttgccgccattccaaagtattttgcagtctgaaataagccggcatcttgaatggtctgtgacgatctcttgcctttgaataggtgaaaaacagcgcttcccgaccgttccccgtttattttgcaaagacaatcgagaaccataatatcgaagtaatttaatgacaacctatccacctacattcttcctgacaaaaatcgttgatttgctctttttattttaacagatttcaaacagaaatcgacgtttaaagtcatcattaagggggatgttatgtagataaccccttatgtgataagcattctcaatcatttttctgttgaaatgtggcagcaacatcattacaataagtaagaggaataggtgttaaattgattaaatataaagattgatccatttgttccaccaagaacaatctgggaggttttattcatggcaaagtacacaatcgtagacaaagatacatgtattgcatgcggcgcttgcggagctgctgcaccagacatttacgattacgatgatgaaggcatcgcgttcgtaacgcttgatgaaaacaaaggtgttgtcgaagttcctgaggtactggaagaagatatgattgacgcatttgaaggatgccctactgattccatcaaagtggcggatgagccatttgaaggcgacccgcttaaatttgaatagaagtaactaaaaaaagctcccgaacgggagctttttttagttaatggatatgtgcacttcgctgctgctcaatccatggcttaagcttgataaaaattagtgagaatacaaccgtaattacaataccttttatcatgttaaacggcaggatacctgcgacgactgctgtttttagcgcgctgtcggataatgccggtgaatgtaaaaaccatgtgtatgccggaagaattagaacataatttaaaatactcattaaaatggtcatcgctgcagttcccaaaagcaggctgacagccaagccctttgctgagttgagttttttaaataagaaagcagtcggtaatataaagagtgttcctgcaataaaattcgcaatttgccctacaggaactccggccatgcttccctgaatgatatactgaagaacattttttatcgcttctacggcaatacccgccaaaggtccgtaaatcagaatggcaataatagcgggaacgtcgctaaaatcgatttttaaataatccggaagacccggaaacgggaaatttaacagcatcaaaacaaatgcaatgctgctcagcatgctgaccacaactaatttttttactttcacttcattctctccttttcgatcacatcttactcgaaaacggaaaggttcttttccagccaataaaaaaaccgcttcatatataaaagcggggtttcgaaaattaggctaggcaaagaaacgtttgaaaaattcaatttcaaaacgcttatgaacctccatcttctcccatccagactgtactgtcggctccggaatctcaccgaatcctgctgtaaagacagctcgcgggcttagagccattggctcatcaccgccggtagggaatttcaccctgccccgaagattgatcatatgaaatttaattacattataaacgataactggttggctgtatagagaattgcttcaaattaaatatattacctgcaagctatcagatcattgatttattaggctttacttttatcctttactgcgtcaatacacgttgacactcttttgagaatatgttaaattatcagatatttagtttgtcaatttaggaggaaatctaacgatgtttcgagtattggtctcagacaaaatgagcaacgacggtttacagccacttattgaatcagactttattgaaatcgttcaaaaaaacgtagcagatgcagaagatgaattacatacttttgatgctcttttggtgcgaagcgcgacaaaagtaacagaagaccttttcaacaaaatgacttctttaaaaattgtcggaagagccggtgtcggtgtcgataatatcgatattgatgaggctacgaaacacggggtaatcgtgatcaatgctccgaacggcaacaccatttcgacagctgagcatacatttgcaatgatctcttctttaatgagacacattccgcaggctaatatctcagtgaaatccagagagtggaaccgcacagcttatgtcggttcagagctttatgggaaaacgcttggtattgtaggattaggccgaatcggaagtgaaattgcacagcgtgcgagagcgttcggtatgactgtgcacgtttttgatcctttcttaacggaagaaagagcgaaaaaaatcggcgtaaacagccgtacatttgaagaagtgcttgaaagtgcggatatcattaccgttcacacgcctttaacaaaagaaacaaaaggcttattgaataaagaaacgattgcaaaaacgaaaaaaggcgttcgcttaattaactgtgcgcgaggcggaattatcgatgaagcagcacttctcgaagctttggaaaacgggcatgttgcgggagcagcgcttgacgttttcgaagtcgaaccgccagttgacaacaaacttgttgatcatccattagtcattgccactcctcacttgggagcatcaacgaaagaagcacagctcaatgtcgctgcccaagtgtcagaagaagttctgcagttcgcaaaaggcctgcctgtcatgtcagctatcaacctgcctgccatgacaaaagatgaatttgctaaaattaagccttaccatcaaattgcaggaaaaattggcagccttgtatcacagtgcatgaaagaaccagtacaggatgttgccattcaatatgaaggcacaattgctaaacttgaaacatcgttcattacaaaagcccttctgtcaggctttttaaaaccgcgcgtagactctactgttaatgaggtcaatgccgggggtgtcgcaaaagaacgcggcatcagcttcagtgaaaaaatttcctcttctgaatctggatacgataactgcatcagcgtaaaagtgacaggagaccgcagcacctttactgtaacggctacgtatattcctcatttcggagaacgaattgtcgagatcaatggatttaatattgatttttatccgacaggtcacttggtgtatatccagcatcaagatacaacaggtgtcatcggccgagtaggacgtattctcggagataatgatattaacattgcaactatgcaggttggccgtaaggaaaaaggcggagaagccatcatgatgctttcctttgacagacatctggaagataaaattgtgaaagaactaacaaatgtccctgatattgtgtctgtgaagctcattgatctgccctaatcaaaaaaactcaagctatctatatagcttgagtttttttatttctatccccgtgtgtttttatgcaaaatatctaagacactccttagctcagaaacaggaatttggcctggtgcggacgcctcttctccagctccaaaagtacaagccgatccaaaaacctcaccgctcagcctgctgatgagccctgttgcagccattgacattgtaataatggggcggtctgcatattttgttttcattgtatacgtcgcatcaagcagtgttaggagatctccagtatcattcggcatgacagccatttttggaatatgcgcgcctaagtcctgcatttttcgaagtctggaaataatttcatcttttacaggtgttttttcaaagtcgtgatttgacatcaccacatagacgttgttttcttccgccagcgatactaacgcctttacatttgcatctcctgaaaataattcgatgtctatcagatcgatgtcttttgtttggattgccgattctagcaaagcaagataggaactttcgtccatctccatgctcccgccctctttgtgggttctgaatgtaaatagaaatagcttgtcttctaaagatttacgaagcttagaaatgagctttgtgaccgcttctctgtcattcgctttttcaaatacgtcgactctccattcaacaatgtccggattcagtaattttactgcctctgcttcattcagaatttgtttttccgtctttcccatcagcggaacgatgattttcggcattccttccccgatggaaactcctttaattgttaacacgttcactcatctcaaatcctttcaatcgttaccttgttttattatacacgtacaacttttttttgaaaatttctattatatgaatagcaactaaaaaagagcctcaaagggcccattttagtttaagaaaatcggatttggagcagccggtaccggaattgcatctgatacgtcatatttgccgattttgtttgttctggtttcggtaaaggtcacttctgtgaagccaaactcttttgcggttaaaagaagtccctcaatcattaaaatactggcaatagaatcctcaacttctgagtcctttgagaaacggatatataagtgcttctgtttcttcgttacagattggacagtacccgcttgaataagcggtgttgtatctttttgactgctcgattccatttccttaatcgcttcttttactgtatcaaaagaatgatttgacggaacgagaaagtcttgtccttgtttattttggtacaagtagtaggatcgttttgactgtttgggaatcgaaatttccgtaaaagtgccatatgagccaatccgaaccccagtctcattttgatccgataaaaatttgactttttcataaggactccattttaaggattctttaagcaatttttttaacagtgtatcatcttttacagaaaatgccgtagctggctgatggactcgtatacttaattccttctgctttggtttttcttttatttctacttcatctatgaaggatggaattgtaatggcatgatccaagatatccaattcactacttacagtcagcatgtcctggatcgtttggtatgcatttgttttttgaatgctgacgggtataattgcagatgtatcggcatcagcaactgctacagtgatgtaattgtcttgttccttttcaggtacaacaaacgatgtatgatccagggatgatgcagcttttgggctgtcttctgtctcagttttcgttactgcgttctcttgggacgcttctttttgttgaggctgtgcctgatcaaagaaatgaggagaaataatgaaggcgatataaaccgcaattgcagcggcacacgcggggccaatccacctgacagcgggcttatttttacgctttgccatcgtcagccgcttgtaaatatcctgaggcgaacgatggtctttaactgccggaagttgacttaacaactcctttatctgttcttcgttccattctgacttcatcatccattagctcctccctcaaaagctccatatgtttccgaagtactttgagccctctgtgttgggtcgtttttactttgctttccgagaagcgcagagccttggctgtttcctgtattgaatatccctgaataaaccgcaagataatcacagctctttgatcgattgtacattgatcaagcgcagcataaatttcccggacattttcatgttgaacggcaagttcgtccggtagcaattgctgatccctgacatcctgtgtatcccagtcaaatgtaccgagtatacgctgtctgattgtttgctgtttacggaaccagtctatcgcaacatggcgtgcgatagacaatagccatgttttttcactgcttcttccttcaaacgtatgataagaatttaatacccggatataaacctcttgaagaaggtcttctgtctggtttttatcctttaccatataaaataaaaattggtacaaatcttgatgatatgtatcatataataattgaaaggtttcttccatttgaaacccctccgttcacttttttgtcgtatgaatagcttgaaaagttacattacaactatattacgagtaactggaatttggaagggaatttatattaacatatccttaaattttattaatgttggctattaaaaaaacacccgctcagtcagcgggtgtttcttatggaacaagattcttcggcaaattcagactcgattttaccgttttgtcggaatataaaaagtaaatgttgttcctttatctattcggctgtgcacagtgattgatccgttgtgggcttccacgatatttttaacgatagccagccctaacccggttcctgctctgccccttgtccgcgctttatctgccttataaaaccgctcaaagataaatggcagatcttcttccggtatgccggacccggagtctttgatatcaattttcaatccatccttcacagaatggactgaaatggagacactgccgccggctgaagtatgccgcagcgcgttatcaatcaaattggtaaatacctgctccatcttgtcttcatcaaacataaattcctcttctgtgagagaaatgtcatgatctaaagcaatatttttttctttcgcaacaccggaaaacttccggatgatcttttctaaaaactcattcacattgattttttcataatgtaagcctgtatggcctgattccattcgggctaaatcaagcaaatcattaactaaacggcccattcggagtgattcgtcataaatgatttgggcaatttctttccggtcttcttcagagcttgcaatgtcatcaacaattgcttcactgtatccctgaagcatggagatcggtgttctcagctcatgactgacatttgcgataaagtcctcccgcagcttatcaaggcggcgttcttctgtcatgtcacgcagtacggcaactgctcctctgacgtgcgattccgcataaagcggcgacatcaaaagcacccatgatctgccttgcagcgtcatctcaatcatttgttctttttcagtgctgacagcgttttgaaacagctcttttgcttcaggcggaaggttgtcgccttctttgatattcatgttctgttcataataccaagcctgaagaaaacgttcagccggcgggttggtcacaagaatcgtaccgtcaatattaatggtaataaccccgtcagccatactgctcaaaatgttagaaagctgctctttttcttgattgagcgcattgatatgaaagttaagctgccggcccatttgattaaaagcggtcgccagttcaccgatttcatcctgagttaaaatcgggatttttgtatcgaacttgcccttcgccaaatcctgcgcgccttctctcatttttcggagagggtacgtgaccctgcttgataaaaagaatgcgaaaaatgtggtcagcacaatcgcaattccagcggcaagaaaaatatagcgggtcgtatgttttgttgtatctttaacggcaagcaaagactgggataaaaagaccatgcctttctttccgtctttttcatacgggacacctacaatcaggcgttcattatccgtgtctgtatcgctcagtcccgtccgtttgcttacttttttatggtctttgagagctttatttaagtctttgtcatgctgtatttgctcaaccgtaatagacgacaggcgatttttatcattcggagaataccagtggttcttctcatcctggatgatggcaatgcttgttaagttatcagcgagttcccaagtgattgaccttgccagtgcctggtcctcgtgattttctaggatgacagcaactttattcgcaagctgtgttaaatcattctcagcttcttccacatggtagttttcaataaactccagcaaaagaaccgttaaaatgaacaatacgatcaagacgagtgaaaggatcgtaaaccacagcttgcctactacgcttttccaaaatttcattcagcgccgacctcaaatttataacctacaccccatactgtgacaatttttttcgcagcttccggagataccttgttcagcttctctctcaagcgtttgacgtgagtgtccactgtccgtaaatcaccaaaaaactcatattgccacacttctttcagaagcttttcccgatcatacaccttgtcaggcgttttcgctaagaaatatagaagctcatactcttttggcgtcaggctcacttctgttccatcagctgttacgcggtgagcatcatggtctattgacagatgtgaaaacacgagcacatttttcgtcggtgtattggcattgaaataagaggtttgggatgctcttctcaaaagggcctttacacgcagcacgacttctctcgggctgaacggcttaacaatataatcatctgttcccgcttcaaacccctgcacccggtttgcttcttctccttttgcggtcagcatgataatgggtgtcgcttttttttcacgaatttgccggcacacttcaattccatcagtccccggcatcatcagatcaagcaaaattaagtcataattggcttcaagccctttggcaatggcttcatcaccattttcagcttcatctatagcataattttcacgttcaagatacattcttaaaaggcggcgaattctggcttcgtcatcaactactaatatttttgtttcgttcgtttggtccatgttttccccctgctttccttctgttactttcattttatcaaatcgtgagaaagtttgagaactgtgtcgctttcaaaggactatgcataagaatgaagtccggcaagcacaagatttacgaatattaaattaaacataataatagcaaaaccgattacggccagccatgctgacttctcaccgtgccagcctcttgacagtcttaagtgcaagtaagcggcatagaacaaaaacgtgatcagcgcccatacttccttagggtcccagccccaaaatctggtccaggcgagctgagcccaaatcattgcaaagatcagcgcgccgagtgtaaagatcggaaatccgattgatacggccctgtacccaacctcatccaccagatcaagattgacgtttttcaccagcggatgtaatagagcgctgattctttttctgatgatcagacggagagccccatacaacacaagacctgctccaaatgaccaaatgacagtgttcacttttctgcctgagaaaagcgcgggaagatcaacaagcggttccattcttccttcggtcaaaagctctccctgatgcggaccgacaagcgcgggcatttcgtacaccatcacgtttttttctttacttttgtccacccagttaaactccgcttcatagcctgcaagacgaaatgctgatgtgattgcaataaaggcgacggttgtgaccaggataaacataatcgcttcaagccagaaggtctttttgcttggctttgtctggtctacatgcttcaaaagaaagatgacaccagcgacaaagctgatggcaagtatagcttgcccaagcgcggccgttgttacgtgaatatacagccagttactttggagcgaaggaattaaaggcgagatatctgtcggaaacatgctggcgtaggcaatcagcaataaagcaattgacagcgtaaacaggcctaatgaaggcaatctatagagaaaataaagaatgataaacgccaaaacaagcatcatgccaaaagcggtggtgaattcaaacatattgctgaccggcgcatggccgctggcagcccaccttgtgatgaaatatccaaggtggcagaaaaaaccgacaatagaaagggtgattccaatgttggcccatcggtttggcctgccctttttatctttattcccgcgtatggccccgccgaagattgggacagcgattaaatacacaagaaaggccgcataaagaaaatttccgctcagctctgccatgacatcactcccttttcgcctatttctgtgttttgattaattctttttggtccaccggttcagtcagtccggaatcagccaatataaatgctaaatccttcttcaggccaaaccagtttttattggtatgccccgctaccataactgcaccgtcctgtgagtgcagccaaattcttcgatgctgccagtacataccttgaataacaccgatcataaaaatggctccgccgacagcaagcacccagagtgtcagatcctttctgactgtaagtccagtaatgtttttcgtttcgacatggtcaaatttcagcttgtatttattattgcctgatccttcgatggtttcttggatggcgacaaagctcttttcgcctttcggtttgtccggcgttatgatattaaagacaaaagccggattgttagggatctttgtttttgtgctcggctctccgtcctgattaaagtagaagtctggcaggtagctggcgatttccaccttgtaaccgttgccaagatcatagaccgaatctggatccagaaggttgatcttcaggctcccaaaggatttttttgtttttttatcaatcagctggaacaccatttggtcaagctgattctctttgtaatccacctggtaaacggaaaaagaatcaaaacgcagcggctgattgacacggatgtcttcttctgttacttttttcagcttcggcttctcgccataaacaattttcccttctctcttgtagagtacggcatcggtttgaaagttctttgccactctaccgtccccgactctgtcaatggcatctgcaaatacctttttttccgttttgctgttataggtctctacgctgaattgattgtttttcaaataatatttcccgtctgtacccggaattgctgcggtttcgccttctctgacccaaagcgtctcatcgacatacatgccaggcacaaatctcagcatcgcaccaaccagaaagatgattaatccaatgtggttgacatacgggccccagcgggaaaagcgtcctttttcagcaagaatgctgccctctttttctctgattctataatgttttttctttaatagagcaactatcttttctttcgattccccgttcagtacagtaaccgtttcactgaacaagcgctgcctttttaaaaaagccgggctccttctgacgccttggttttttaacgctctgtacaacggaatgacccgatcaaggctgcaaatcacgagtgaaatgccgatcgaggcaatgagcagcaaataccaccaagaaccatataaatgatgaaaccctagcaaataataaagctggccgaacgtgccatactgctccttgtaataagtatcagcctgtgcgcccggaggcagataggcttcctggggaaaaatggtgccgaacgctgatgcggcaagggttatgacgataagccatattcccaccttaaccgaggaaaagaaattccaaattttgtcgataatcgttttgttataggtttgcgaacgtcttgcgcttccgtcatatctcatatcagcgagcggaggttgagtttcctgaagagctcttccgcacgattcgcataaaacggttccaaccgggtttatatgtccgcattcacatttgacttgcttcatcccgaagtctctccaggttttatgagattcatatattcgtgtatcatgctttctgtcatagtgccggtcaccaccttgacaacttttccttccggattgatcaaaaaggttgtcggaagcggagatacgtcataggcatcaagcacttggcgatctgtatccagaacaaccgggaaattgactccgtaggatttcataaaattatgtactgctatctttgactccccaacatttacagcgacaatttcaacaccttggcttttaaaatgcttatattggtttgccatataaggaaactcttttttgcacggttcacaccatgtaccccagaaattcaaaaaaacacctttcccttttaagtcactgagctcgatacgtttcccattcgtatcctcaaggacaaaattcggtgcgtcggacccttcggatatactctctttgccggcaaatacagcgttgtaaatggtatagccgagtgcgcagattaaaacgagaaggatgccggtccgaatgaataaacgcctttttttcttcattgtccactgcccccttccccctattgcagatccattcaattatatcattgcacgttcatttcacatttcttactttttgaaggttatgtgaaatttagaaagcgtttttaccgtgatccgccagtgctctgagcctttttacttcgtgaggcgtaagctctctggcatcgcccgtgtgcaggcctcgcaggtttaaaaacgcgtattcctcacgcttcagcttgattacctcatgtccgatcgcttcaaacatgcggcgcacctgtctgttgcgtccctcatggatcgtcagctgaataatgcttgtctgctttttcttatccaaagacagcagcttcgctttagcaggcgctgttttgccttcctccagcctaattccgcgctccaactttctgagcagctctttaggcgggattcctttcaccttcgccacgtatgttttgtctatttcatacttaggatgcattagcttattggcgaattcgccgtcattggttaaaagcaaaagaccgctcgtatcatagtccagacgcccaatcggataaatgcgctgcggaatatttttaaaaaagtccgtcaccactttgcgtcctttatcatcttgcgctgcggaaataacgcctcttggtttatataagagaaagtaaaccggctcttcgcgttcaacctttaacccgtttacctcaatctgatcagaaccggtgaccttaacacctagctctgttactactttgccattcacctttacttttccttctttaatcagctcttctgcctttctgcgcgacgcaactccggcatgagcaatcactttttgcagtctttccatgtctttcacctcaagtattatcttacttttttcaaccttaacaaacaagctttttcaaattcctatgccaaatctaaaaaaaacgccgttttcaggcgctcccaaataataacgtaacgatgatgatagatgcaactacgccgattaaatctgcaagaagtcccacctttaatgcatcacccatttttttaatgccgactgctccgaaatacacagtcagtacgtaaagcgttgtatctgtagatccctgcatgacggaagccagcctgccgataaaggaatcgggcccgtatactgcaattaaatcggtcgtcattccaagtgcggccgtaccggagatcgggcggatcagagcaagcggcactacttcagcagggatgccgatagcggagaaagccggttttaaaagatccattataaaatcaagcgcgcctgatgatctgaaaacagttatagcgacaagcattccgactaaataggggataatggaaaaggcaatttctatcccctctttcccgccttcgacaaacgattcatatgtgggaacctttttgatcgttccataaagaagaattccggcaataatgattggaatcatggctaaagacagccagttgatgatttccatccgctcaccttcccttctttttgcggcggtaataaaaataccgatcaatgataatggcaccgattccggaaataagcgttgccaaaatgcttggcccgacgatatctgtcggcgttttggaggaataagccattcggacagcgatcaccgttgtcgggatgagtgtgatgcaggacgtattaacagctaaaaaagtaatcatcgaccggcttgcttccgatcggtttccgttcagctttttcatttgttccattgctttaatgccaagcggagttgctgcatttccgaggccgaagaaattcgccataagattagataaaatatagcccatcgccgggtgatccggcggtatatcagggaacagtttagatataaaaggtctgcacatccggctgaaaatatccaaaagccctgactgctcggcgattttcattaagccaagccagaaaacaagcacgctcatcaatccaaatgagatcgtaatcgcttctttcgcacccttaaacacggcttcatttacatcttgcagagttccgttgcacatcgcaaaaacgagtccgatcacggttaaactgacccaaattatattgaccattttgctccgcctgccgcattcagaaagattgatttaaacgtttcaaaaaattgtttcttcggtttttgatgccgctcattttcataatagatcggcacttttgcgatggttgcatcgttgaacatgatctccatgtgccctacgatgtcagggattttcgaggcatctttttcccatgcttttttcggcttgagcagtgtggtattaatttttacattttctttttcctcttcggtcagtaaataggtgatatcacgtttgataaaagccttcgattcataaaatgtgcctttcagctttggaatatcccctttttttgcaattaaataggtttgataatgctcaaacacatagttaaacatcttcatatggtcatcccaatcattagggtcattaatggtgacggctatcaggtcaatgccgtcctttgaagccgtagagaccagtgtccgttttgcaagttttgtatagcctgtttttcctcctgtgctgtacggataaagcatggtcagcagtttgtttttgtttttccatacgctttccatcgtttccgctttgtatatttttgtgcctgaaatcttttgatagtctttcagcttcatagcatacttagttaaaatggccatgtcataggctgttgaataatgattttcatggtcgtccaatccgtgcgggttttgaaaacgggtgtttttcataccaagctgctcggctttttgattcatcatataaacaaacccatcgaggctcccaccgacatgctcagcaatcgcgacagcggcatcgtttcctgatcttagcatcaggccatacacaagatctttcagcttcactttttgaccttctgttaaataaatggcggagccttctgttctgacagcatttgccgaaaccgtcactgtttgatccattttgccggattcgatggcgaggacggcggtcataatttttgtgatgctcgcgatccgccttttttgatgctcatccttggcatataacactctgcctgacgcaccgtcaataatgatcgcgctttttgcactgacatctatagcagcatgtgctgtattcacatttacggttgcaataagaaaagaaatcatgatcacgaatactgcttttttgaaaatgcgcatgtttgctcacgtccttgtggtggtttgtacaagtttatgcgcatgtccatcagttatgaataacaattatatttctggaagcaaacataaaaaaactctccctgaaaaagggagagtaaacgttatctgattggcgccatgcttgatccggacgcttcgtaatgagccagctcttccctcatcttcagaaaggccgcgctcaacggcaataataattgctcaagcgacgcaggaacagcatgataaaactcaattgcgctgaccccggtataagacgcccggctattttcacaccacgtgtcttttttcggcataaagaactcttcaatgcattggtgatacacattataaagtgttttttccgctctggcttcctgaaaaggctcctgcatcaggagacgacggcacgcttctgcgcctccttcacaaaatactgccattcttctcagagtgctaagcacatcacagcagtatcctttttcaataggcaattcagcctgtaaggactcaagcgtcgtttgatttaggtaatcgttcacggtattgacaaccattgataagaattcgcctgttttttgagtctgcgctcgcacaatcgaatgtcccatttcgtttggtatcttcccctcatgtctttgtctctcacattttgcttctttcatgatagcttcttccttatatcttatgatgatgaaaaagcgcgattcattaaacttctattttatatcttcgaaggtttggttaaagttttcaaaaaataaatctgcttcttcttgaagaacgtcttcttccgcattttcaggcagcggcggaagctcgtccagcgttttcaggccgaattgttcaagaaaagtcggcgtagtaccgtataaaatggcccgccccggaccatcggcacgccctacttcacacaatagcgccttcgcgacaagactgtgtaaaatccgctctgattttactcctctgatttcttcaatttctgctctcgtaattggctgtttgtatgaaacaatggccagtacttctaaagatgcttgagaaaggccctttgacggcacttcaatcagttttttcaagtaaggcgcaaagtcttttttggtagagagcatgtacgtatctgcatactcaataagttcaatccctcgtgtatctccgcggtattcgtccgccacatccgccatgatcgtgttcagttcaggctcttcgatttcaagcactgttaacagctgcttttttgtaagcccttcatcgcctgccgcataaagaagggcttccacaatagctttccaattcacgatatcaagccccatgaatggattcactccccgtaatgtaaatatctgaaaaattgtgctcctgttcaatgaggaccagctgatttttcatcagctcaagaacagctagaaaggtcactactaaatgttctttttgttcatatggaaacagatccataaagttgattctcgttcctctagatttcaagctgtgcacgatttcgttcattctggcttcgattggtatgtcctgtcttgtaattgttgtttccatcggcctgtttatttttttgcgtttcagcactttttgaaaagctccgatcatatcatagaccgtgacagagagcttttgctcagactgttttacttcttttgcatattcactcaaatcactcggcggtttcgtgaacgatttttgtctttcttcttcccgttcttttaaatccttcgccgcatctttatattttcgatactcaatcagcttttcaatcagttcctcccgcggatcttcttcttcaagtaattcatcttcaaaaagctcctcctcttgcttcgggagcagcattctgcttttaatgctgagcagcgtggcagccataaccaaatactcgctggccatatcgagctcaagcacacgcatcgtatgtacatataataaatattgttcagtgatcttcgccacaggtatatcatatatgtcaatttcaagacgattgattaaatgaagcagcaggtccaatgggccctcaaacgtatcaattttcacttgatattcttccatcatctcaccattttcaagtatcactctcattgccggaaaaactggctaccctatagtataagccaccaaaaagctctcgtccaatactatttcatttcctgttttgaacaagtttgtacagaatattcaaaacacgagaggtgtttgctcggagcgcagaagcgggagaaaaagccttagcttctggttttcctttctaagaagcaatagaggccgagcgttcttttttccttttatcccttctatggtacactaaaagcacattaaaggaggaagcaccttgtatccgaaagcttatatagattatctcgttgagtttcacgcgacacgggattattttgaatgccatgaaatattagaagaatattggaaggaagatccgccaaagaaacgaaaacgctattgggtgggctttattcagcttgcagttgctttatatcatcacagaaggcagaatacagccggggcaaaaagactgatggcgaacagcatccggattcttcaagcagaacaccgggcagtcgaagacttagggcttgatcatggccgtttgctcgaacttatgcaatcggtttacgaacaaatcgaaaccggctctgcctataaaagcattatgctgccaatcaaagatgagaaactggaggaagcatgcaggatcgaatgcaggaaaaaaaagtatacatgggggcagcccagtgcactcaggaacatatttcttatcgacaaacatcgtttgcgggatcggactgacgtcatccgtgaacgtgaaaaagaaatagaacgcagaaaaaaaagcagagactgatcacagcctctgctcagcgtgtcgacaaaccctcgcattcgttgtcaagcctgtgcgttggtgctcacgaatgaaaacattcgctccgctccaatgctcagctttcctagacttcaagggttttcaatcgcgctgaaaggatgacaaaaacctaaaacaaaactgttttcggattttgtcatcaaactaaagcagaggctgatgacagcctctgcttaattattgtatgaaatgtcttgatcctgctgaccttgacaacgttcgaaaaagctctgcgttaattcatttggaaccagtacttgcgttttgaataaatgctttaaagcatccatcatctgttttccgattccttgatggcgatgagaaggattcacactgatatgccggatctcaacctcagaatcctttttttcgactccgattgctccgacgatatcctcgtcctctttccaaagaaagagctggcggtctgtatccgtttcgtagtccttaattgtctgctgaagctgcttaaggtctttttcattcggcataaacgaaagaagccccatcgcaatcttttcaaacgattttttataacgaattaacataaaaacccctctatatccaaaatgtccagtctgctattaacggatacgaataggtgatccgttttctcacattatatcattttcgccatatttttaaactgttttcagcaaattattcaaatgagcggtttaaatttgccatttcaatggcagaaacagcacaatctacacctttgttgcccgcttttgtgccggcacgctcgatagcctgttcgatgttttcagttgttacaattccaaagatgacaggtacaccagtagtgtttgctgcttgcgcgatgccttttgcagcttcattgcagacataatcgtaatgtgtcgtcgcgcctctgatgacagtgcccaatgtgataatagcatcatatttttttgtttccgccatttttttcgcagcaaacggtatttcaaatgcgcctggaacccaagccacatcaatgtcatttgtgtctacaccatgtctgagcagcgcatcttctgctccgctcagcagcttgctcgtaataaaatcattaaatcttcctactacgattccgattttaagacctgtaccaactaaatttccttgtatgatattcatatgattcccatccttttttgtgatatttgtgattagaaatgaagtaaatgacctagcttgttcattttggtttgcaaatattttttattgtgttctttcgcctccatttgaatcggcactctttctgaaatacttagtccgtagccttcaaggcctgcgatttttcgcggattattcgtcaaaagcttcatattccggacaccgaggtcgcgtaaaatttgtgctccgatgccatagttgcgaagatccggcaagaatccaagcgcctcattggcttctacggtgtcataaccttgttcctgaagcttataagcttttaatttattgattaaaccgatgcctcgtccttcttggcgcaagtacagaagcactccacggccttctgcggcaatttggttcagcgcggcgtgcagctgcggtccgcagtcacagcgatgagacccaaacacgtcacctgtgagacattctgagtgcacccggaccaataccggttcttctccgaacggcacctctcccatcacaaatgcgacatgctcttttccatctacctcatttgtgtatccataaaccttaaatgtcccaaaatcagtaggcagcgtaatgtcaacttcacgctcgacaagtgttgtcagattgtaacggtattgaatcaaatccttaatggtgatcatttttaattgatgctttttcgcaatttcaatgagctcaggcactctcgccatcgttccgtcttcattcataatttcacaaatgacgccggctcctggagatccgcaggcttcagcaagatcaacagcagcttctgtatggcccgctcttttcaggacacctccttttttcgcaatcagcggaaaaatgtgccccggacgctgaaaatcagatggcacggatgtgctgtccagcaatgcttgaacggtaaaagatctttcttgagcgctgatacctgtcttcgtttcacgatggtctatacttacggtaaatgcagtgtggtgagaatctgtattatgctccaccatagggtgaagatcaagcctgtctgcgatttcctcactgagcggcgtgcagatcagtcctctcccatgtgtcgccataaagttaatgacttccggcgttgcatgctcggcaagagccacaaagtctccttcattttctctgtcttcatcatctacaacgatgatgacttcgcctttttttaaagcgtccagtgcttcttctatcggatgaaacatgcaaatcttcctctctaaaagccgttttcgcttaagaaggcttttgtaatggtttgttgggtcttattttcattggctttatgcaaaaatcgatacatatattttccgatcatatcgcattcgatattcactttagagccgatcgttttttctgaaaagatcgtttcgctgatcgtatgcggtattaaggagatcgtcactgtgtcttctgtcaggccgaatatggttaagctcacgccatccacagtaattgatccctttaaaaccaatgtttttgttaatgacgggtccatttttaaatcatagtaaactgcgttgcttttctcttcaattcgtgtgatttccgcagttccgtcgacatggcctgagacgaaatggcctccgaaacggccgtttgccgccattgctctttccagatttactttgcttccttttgttaaatcattcagtgacgtagctttgactgtttcaggcataacatccactgtgaattgattttttgtaaaatcagtgaccgtcagacaaatgccgttcactgcaatgctgtcgccaagatgaacatcctctaaaatctttgagcatttaattgttaaggccattgaatgccctgcttttttcatggattcgattgtgcctgtttcttcgataattcctgtaaacatggtcaccatcctattcctttgtcggttttgccgtcagtttgatatcacggccgatttgggttatatcagtaaattgtaataaggggacatctttcattgattgaaaaccttcaccggagattaagctgggagcatgcgttcctccgattagtttaggggcaaaatagaagatgatttcttgaaaacagccttctttgacaaagcttccgtgaacagctgaaccgccttccacatacaccgacatgatgccttcttccgctaggatcttcaaaacatcaggaatttgaatgcgctcggtttcaagtgtaaatatgttcactccgaaagctgaaagccgttttttcttttcctcgtctgcgcgtgccgtcgtaaaaatccatgtcggcgctatttgatcgcaaatcactttagcgtcctcaggaatcgagagtacggtatcaagtatgacccgaaccggctgttttgttacattcggcagtctgcaggttaagcttggattgtcggctttcactgtgccaactccgactaaaatgctttggtgtgttttcctgtattgctgagcatcctgtcttgcagcctctgacgtgatccatttgctgtcacccgtgctggtagctatcttgccgtcaaggctggcagccgcttttagcgtgacgtacggaaggcctgtcctcataaagtgcagaaatttttcattcaggctctccgcctggtctgccaggatgccttcccttacctcaatgccggcttctttcatcatgctgatccctcttccagccacaagcggattaggatctctcatcgccacgaacactcttttgatgccagagttgataatcaattctgcacatggcggtgttttcccgtaatggctgcacggttcgagtgtaacgtaaatgtcggcaccctctgcatgtgctccagccatatggatggcatgaacttctgcatgagcttccccatattttaaatgggcgcccattccgacaatttgtccgtcctttacgacaacagcgccgacgagcggattggattcggtctgtccttcgccctgcttcgcaagatctaaggccagcttcatataatactcttccatttgtttccctcccctcttttgttatttaccgtcaaaaaagccccgaatttataaaaaattcggggctttaggtattttacgcaataggaaataacactatgcatttttgaaccatttgcatagcggttcatcatccttctcccatccagactttcactgtcggcttcagcttaaactgaatccaccgcgtgcttatgcacacgggtcacgggctctaaagcaaatgtgctttactaccgccggtcgggatttccaccctgccccgaaggatacaatctttattcatttgtccttattggctattatagcgatcctttttaaagtacgcaatgaaataaacttacaatttgagaaaaacaaaacatcacccttcgatccgaaaggtgatgttttgttaatcattcacttttgcaaccttgattaatccgtcgatccgctttgatttgctgaagtatgccttaatcttgtcaccttcttttatatcagataaatcctgatttaatttttttccgttgaagatgattttcgttccgttttctgctactccatgatactctgagccgtcaattttcgtcactttatattcctggatggtgtattcctcttcttccgaggacaaggtttgtccaattgctgtcggaacatccttcagctcaacgtcatttatgtacatataaccgcctgcaagtaaaagcaaaagcactaacagaatggtaatcttggtttttattcttcccatttctaaacctccagccaatatgaatctattcattcatatgagttattcctttttttcatgaataaaaaaccgtaaattctcgtaaattattaatataacgatgcataacgggaatatgtttcacatttctgcaaaaatttcttttctatagatatacgaatttatgttctgttttaaggggatgaccgcaaaaaagatataaaaaagcagcctctcgggaagctgcttgatcctaatttgttttgcgcatttcgttaaacgggtagaaaacaaactttgacgtacccgcaatttgttttttcgtgaagaggccaaggccgttacggctgtccatggaattgcgacgattgtcacccatcacaaaatacttgttatcaggcactttaaccgggccgaaatcatcggtcaaatggtcaaaaccgtcctgtttcgctctctttttattagccgccaaataaggttcgtccacctttttcccgttgatatagagctggtcatttttcatctcaaccgtatcgccgggaaggccgataatacgtttgacatagtgaacatcatctccgtttaacacgacgatgtctcctctatcaaactcgccgatgtatttgactgtcatattaacaaaaaccctttcacggttgtgaagtgtaggatacatagagtcaccatcaacgacatacggcgcaaaaataaagttgcggatgagcaaagcaagaacgacagcaatcacaattgcttttgcccattctaatattgactttttcttcgaaacattttctgatttcaactgatttcctccaataaacaacggtcttcaatttatgttatcacgaatcgaaaaaaaatcccattaggaccattgaagtgattttacaaactgttaatcttcatcttctacccacatcatgcctattttttcttgtcgatcataactaggcctgaaaatattgaaagaaatgaatcgcataattcagaagcgatggactcagaagaaagagagttctcatatgcaaaatctttagatcgtatataaagcatgaggttacgggcagtttgttcatttactgcattccattgatctcccagtccatgatacccatggcacttgacaaaacaattaacgtcatgaaggttactggaatgtttgcggcaacctatttcacaggtgataaccgcaccccgttttttgctttcataatatgtttaaaatcattcaagctcgaaaacatggatcagcctccaaaaaataaatccaatatattcccggcagttgaagactctttattataaaactctgaatatccgcagttcttacagtaaaccactagaaatcggttatgctgcacgtcaaacagctttgataatcccgtgccggttgtggctatttctttttgtccggcttcagtactgccgcattttatacagcctttgttgtccataccgcgatctccttttcattacatcacgtttgtttgatttattttactacaaaataccaatcccaatgaaccgtactactttaaagtttgcttaattttgatcccccgttctttacatactaattgggttcgtttctcagcttggtaaatcttctggagaaacggaaaagctccatgaccaaaacatttaaacccagccaaacaccgccgaaggcgcaacccgcagcaacatcactcggatactgctcattaacgcgtacacacgatcagcccgatgaggaataaaacgataatcatcaaaaaacgcaacagtttgcagacgagccttgtgagaatgacgaacaaaaagataagcacaaaaaccaaaaatgacaaatgccgttaacgtctgttcgctcgggaatggatataatacatgactttccaaaggagcgtgaacaggatgaagggaatgaaagagccgtctaattccctctccataaagctctcgcaccaacgactaggaaaaataagaaagagagttcgattttccggtcttgccctttgaatactgtccaaagaaaagttagaacaataactgctaacagaacatctctagacgcaaaagctttctgaattgcagctgggcccagtctatacccgatccaatacgacatgctcactcccgcacagctccccaatccggccgctaacatgcttagcacccagtttaacttttcttgaaacacgagaacaccggcaaactctcctggtccaagtaaagatagaaactctaacatcaagacaataaacaagacggcatatccgtactgttcgagcaaccccgtcaaaacttgcatgtcattctccttaaacttttttgttcttttatcattcccaatccactttttgtataatcagcacaatttcaccttcagtcgtccaacaacattgtctatggcgggatcttctctcctatactcgtcactcatacattcttttttgacataggaggagcaatagcatgaaatgggaggaaacaaaagatacacagggagtttgccaaaattttgggcagttcgttctgccaccgagtcaggtgtttgtttgcctacctcattccttggccattccccattttccccgtttgaggttcgcaatgataaagtatttcacttagtttcgtacatgaagaggtaaattctttgctcaccgaactatgatagctgcgcatgatgattactgcattgcataaccactggttatttagtgagccgtgagcaatgtatatgcactttgagtcagcacaggatgatcctattacattcgccagaaaagcagctgccgcattcagagtagttaaaagaatagacagatagctgggcttccggaaggaggcgcttttttcgagcatttttataaatcaataaaaataggcatcttctaaatatttttgccgataagtttacgctaatcaactctagcactaatacatataaacaatagaatgatatgaaaggagacttaatagtatgattgattatcctattaatataaacaacgtttccgggaacagtgtaattaacgtaggcggcgcttttatgatcaggcctttaactttgtccaaatctgtgtttggctccggaggtttaaatacaggaattgtctttgaaaataactttgtaagcaaggctaaaatgattaatcatcaatttactgatcaaaacgtcaccaaaactttttaatctattcattacgggggcttgcgatgtctcactaactaaacacctggttttgccaaccgccatcagcactcggcggttttttattgaacatttttacccaataaaaaagctccctctatatgaggaagccttttgcctgccaattagccttctacgcgaacttctttcatgacatcgccgttagacatgtttttcgcgaattctaatccgcttgttactttaccgaatacagtgtgaacaccgttcaaatgaggctgtggctcatgaacgatgaaaaattggctgccgccagtgtcttttccggcatgtgccatagaaagtgcgcccgcctcatgtgtatgcgggtttccttctgtttcacatttgattgtgtatcccggaccgccagtaccagttccgtgcgggcagccgccttggctgacgaagccaggaatcactcggtggaatgtaagcccgtcataaaagccttcgttcgcaagcttttcaaagtttgcaacagttccaggtgcagcttcaggataaagttcaaattcgattttgttcccgtcttctaataaaaagtaacctgttttcaattgtatgcctactttctttattttaattttcaaaggagattatgtatgataggttatagcctgtctctccttgtcgcggctattataccacacctttcgggggaaaacgaatctcccgggctttactaaaaaataaaaatgaaacctgaatctctttatctccgtctaacctaacggaactgtatttttcatgattcaggtcctcacaaagcagcactatccagctgcttgtgaaattgaaggaggtcaaactgctttgaagaaaatttggattggaatgctggcagcggccgttttgctgctgacggttccgaaggtcagtctcgcggatgccgcagttggagatgtcattgtaacactgggtgctgatttgtcagaatccgacaaacaaaaagtgcttgatgaaatgaatgtccctgataatgccacaacggtaaccgtgaccaataaggaagaacatgaatatttaggaaaatatatatcgaacgcgcaaatcggatcgagagcgatttcttcatcgtcaatcaccattgccaaaaaaggctccggattgaatgttgagacccataatatcagcggcatcacagatgaaatgtacctgaatgcactgatgacagccggtgttaaagatgcgaaggtgtatgttacagcaccgtttgaagtatccgggactgcggctttaactggattgattaaggcgtatgaagtttcttcagacgaagcgatctcggaggatgttaaacaagtcgccaaccaagagcttgtcacgacatcagagcttggagacaaaatcggtaacgaaaatgcatcagccctgattgcaaaaatcaaagaagagtttgctaaaaacggggtgcctgataataaagctgacatcgaaaaacaagtggacgacgcagcttctgatttaaatgtcacgcttacagacagccaaaagaatcagcttgtctccctattcaataagatgaaaaatgctgacattgactggggacaggtcagtgaccagcttgataaagcgaaagataagattacgaaattcatagaatcagatgaaggcaaaaacttcatccagaaagtcattgatttcttcgtatctatctggaatgcgattgtatctatattcaaataggaaaagcgccgaaaaatcggcgctttcttttattgctttacacccgttttaaatggcagatcaagttttacaatatcttcgtatgtttctcgcttcacgactaaatgagcctcaccgttttcgacaaatacaacggcgggtctcggaatacggttataattgttggccatgctgtatccataagcgcctgtacaaaaaacggcaagaagatcgccttcttttacttccggcaggtcaatatcccaaatcagcatatctccgctttcacagcactttccggcaattgataccgttttgtcatgcgcttctccgatcctgttggctgccgcagcttcatatttagcttggtaaagcgcaggacgaatattgtcgttcatgcctccgtctacagccacatattggcggacacccggcacttctttttgagagccaatcgtataaagagttgtgcctgcgtctcctacgagagaacggcccggttcgatccaaatttccgggatgtcaaaaccgtaacgggaagcattttctttcacagcttcgataattttttcaacgtattcagtggcatgaagcggttcatcatcttccgtataacgaatgccgaaacctcctccaagattcagcaccttggatacaaatgaatatgaatctctccattcgtctagttttttgaagattttttccgctgctaacacaaaaccggccgtatcaaagatttgcgagccgatatggcaatggacacccagcagctgaatgtgttccgattgtaatacttgttcaatggcccgttcagtttgtccgttatgaagatcgaaaccaaactttgaatcttcctggcccgttgtaatgtagtcatgcgtatgcgcttctactccgggcgtgatccgaagaagaacatcgatggagtgacccgtttctttacataggtcttcaagaagcgcaatttcatagaaattatccaccacaatgcagccgatgcggtgctcaagcgccatgcgcagttcttccctgctcttattgtttccatgaaagtggatgcgttctgccggaaagcctgccgcaacagccgtatatagctctcctccggatacgacatctaaagaaagtccctcttcctcagcgagctgaatcattgcgactgatgagaatgctttgctcgcatatgccacctgtgctttcagccctgcagaaataaacgcctgtttaaagcttttagcacgctcacgtattaaagccacatcatatacgtaaagaggtgtaccatatttctccgctaaatagagagcatccacacctccgatttctaaatgaccatgttgattttgtctgcttgtgccgtgtaagaacaatgtcattccctctttctccgcttatggatgaaaggacagttttatggactgtcccttcataattaagacatacattatcatactcttcagtcagtttcaatgcgattatgaattggtaggctgtcttaagcgatttttggggtgaacgatactgggtcttacttttgcgccaggtttcgctgtgcggacaagaacctgccacagcgcctttccgttaaagggaatcagcggccataagtacggtgtctgaagggatttgatgcttgtcatggcaataattagcactgtaaatccgatgacgagcccttttatatgaaataaagcaacgagtatcatgaggacaagacggctcattttgtttgccaagcttaattcataactaggcgtcgtaaaggttccaatcgccgcaagtgagacgtacagaatcacctcaggagaaaaaaggccgacctcaatcgcaatctgcccgatcagaacagcggcaattaaacccattgctgtcgataaagccgtcggtgtgtgaatggcagccattctgagaaactcgattcctaagtcagctaaaaatatctgcaggatgatcgggatatgcgtatctttatttaaaccgataaatttcatgttgtccgggagcagatcaggctgaagcacaaagagaaaccagatcggaagaaataaagtagaagcaagaataccgaaaaatcttacccatcttaaaaaggtcccgactgaaggcgcctgcctatattcttcagcatgctgcacatggtgaaataaagtcgtcggggtaatgatcacactcggcgatgtgtccactataatgataacatggccttctagaacatgatttgcggccacatccggtctttctgtatagcgcacgagcggaaaaggattatagctttgattaacaatgaattcctcgacagttttgtctgccattgttaatccatcgacatcaatggatgcaatttctttttctacgatctcaaccagatccggatcagctatatcttctatataacaaatgcttaaatccgtctttgaccgctcaccaactttcgtcatcttgactcgaaggcgttcgtctctgatccgccttctgagaagggccgtattgacgacgatattttcaacaaatccgtctctggctcccctgactaccttttccgtatcaggttcttccgggtttctgcccggatagcttctgacgtcaattataaatgcgaaacctgcaccttcaacaatgacagcgacgagcccggacagcacttggtcggtggtttcatccaatgtttttactttttcgacctgggcgttcagcagcctgttttcgacgatgtcgaccagctcatcagggtcttctttccgattgttaatggcaacaagttctctcattaaatgaataatataggctgtatcgcataatccatttagatagtaaagctggatctctttatctaaaatcgtgagcttgcgaacacctacatcatagctcgtccccatcccgacacggtttttgaaatactcttcatttttagctggattccgataaacccgaattttctcttccttgtggtccggcatgatacccgctcctttctaaaataaactcgaccgctttcatggtgattggcgacccttttgagatatcgtcttttctgcccattttgccgatatccccgataccaacaataagcgggagatcaagtttatcaaggcaatagactgtatctccactcattctgtggtcatcaaattccctttccccgactttatcgacgccgtattcagttatttctccattgcggtcaatgcttacatcgaccctggtccattcagcctgatgtgtttttgacgcgaccgcaatcacaccgagcacttcaatagacggatgggttgcgacataggtcagagcggcttctcccggaccctctccttgaaggccggagtcgtcaaacatgacaaatacaggatcatacggtgctgaggcgatcagcttgacaagctcggcgccgctgcgggtggaaggattcccttttgattgtgaaatacatcgacctcccactttgcttgcggcgtattcaattgttttagcggcataaacatccccgtctgttaccagtatgaccttgcgttttgtcgtcatgtcggcattatcctttcggtttgaaaataacagctacgataaaggcgaaaagaatagcggctgagataccggccgaggtcagctcaaaaatccccatgccgattcctataaatccgtgtatatgcgcctgatgcatagcaccgtgcagaagactgtgaccgaagctgacgatcggaacggtggcgcctcctccggcaaattcaataaatttatcgtaaatgccgaaaccatctaatattgcaccgattacaacaaatgatgtcatgacatgagctggcgtcaatttaaaaatatccaagagcagctggccgacgatacaaatggccccgccgcatacaaaagccaaaaggtagtccatgttaagatgcacctcctgcacgctcaaatacaaccccgtgggcgatagtcgggatggtttctttttgctggatcatcgtcgggcttaacagcgccccggtcgccacgacaaatacacggtttaattttccttctctcagctgcttaaaaatatgagagtaggtgacaaccgctgaacaagcacagccactcccccggcaaagacctgctgatccggagtgtaaatcagaagcccgcaatcatcatgctttgtgccgactggatatccatcttcttttaagatgtcttttacgattggagaaccgacgcctgacaggtcacctgtcaggattagatcatagtcatccgctgtccggttgagatctttaaagtgctgcttaatcgtatcagctgcagccggagccatagccgatcccatatcaaaaggatctgtaatccctaaatcagaaacctttccgacagtcgcacttgtgatttggatatcacccggtgtctgactgatgacaactgcaccgcttccggttacagtggaggtagcagtgtccggtttttggcctccgtattctgtcggatagcgaaactgtctttccgcagttgcattgtgactgctggtggcagcaagtgcccttttggcaaacccgccatcaactaaggctgatgcgacagccactgtttccattgatgttgaacaggcgccaaacatacaaagaaatgggattttcaagtgtcttgccacatagttagccgtcacgttttggttcagcaagtcgcctgccagcaataggtcaatatcatcttttgtcagattgtttttttgaagcgcaacattaacagcgtcttccatcagctggcgttccgccatttcccagcttttttgattacaatgcatttcgtcataggttttatcaaataacgagccgagcggtccgtctttttcctttggtcctgctgccgttcccgctgagttgacaaatatgggatgttcaaatacccaggtttgctttcctgttaatttcattttcttctcctcctatgacatcagtttctcaaaagcaaaccgaatcattccaacgatgtatgcagctacaactccgaaaacaataacatttcctgccagtttaaacatatttgtcgctactccaagcactaatccttcacttttatattcaagagccgcgcttgccatactgttggcaaaacctgtgacaggtacggctgaacctgcgcctgcgaattgtccgattctgtcatagatgccgaaccctgtaagcagggcggaaattaatatcagcgttgcagctgttggattccccgcagttttttcattgaaatcaaaaaaatgaatataaaaattttgcagaccttgcccgattgcacaaatcagtccgcccactaaaaaggcttttacacagttccagacgtaaggcggcttaggctgatatgttttcacttttgatttgtaattttcttttatgtttgtcatcttgaaacctccttatgaatggtcaataaagtacagccaatgaaataaggatcccgcgattttcccaatcacgatggccattaacagaataatgattttacttctgagcccgattcgttttgccaaaatcggcaggacatttaaaacctctgtaagagcagccgctagcatcccgacgaacaaacctgccagaagcccgaccggcacagctatccattttgttagataaagatgattcatatgaagcgtctcccatcccccgcaaaccgcgccaagaataacagccgcttcataagcctgaacaaatctcattgttttggtgagctgcatcagccgcggaatgattcccattacggttaaaaaagcaacgaaacccgcccccaccgttatgcctccgccgagcccgacaaaaataatgaacaatacactaacgatcatgcagatcctttatggtttcttgattctcatgcatggccacatattgatcgagatcaagctgatagttaaacatctcaacctccagcgggctgggctcttcatttaggcgctttttaaatatgtggttaaaaaacacgatcatccccagtcccaaaccgatgctgtatgggatttgaagcaaatatggatagtcattcctctctccggttatgatttcatatagtgcgatatgaacatctctcatgcttacatcctcatgaaagttcatgatggcaagacacgatccaataaacagaagcagccagacaccgataaatagaaccgttgataaatttcgctttcgatattgaatttcaacaatggtttctgctccgcctacggtttgaacatcaagtgtcggatcttgtaaatgaatggctctgaggacttgtatgatatccagaattacgatatttttatctttttcgctcacctgataaagcggcatagccgaaagtttctttttcagctgaagctgcccttctatttgcgcggcatctccaacggtaataatatcccctggatgtgccagcacccggtggcgaagccggataaatattcgtcgttccatcattgatcaccatctttcggtggttatatatgtagtatgtggttcgattttgttctcattcatccgctcgaaaagaccataaattaccacgcttttgcacataaaaaagctagcctgcactgcagactagccatccgtatgatccatttgaaccttgatctgttttaatattttcttttcaagcctggaaacctgcacctgagagatcccgagccgctcagccacctcggactgtgtctggtctttataatatctgagatagacgattagtttttccctttcctccaaatcgctgattgcttctttcagcgcaattttgtcaaaccatttttcttctgagttgtcagcgatttgatcaagcagggtaatcggatctccgtcattttcataaacggtttcgtgaatcgaagatggagcccttaccgcctcttgggccagtacaacatcctcagcttcaatctccaaatggtcagcgatctcctgcaccgtcggcactctgcccagtgttttcgaaagctcatccttcgcgcgccggattttgtttccaagctcttttaatgatcgtgatacctttacagttccgtcatcacggataaatcgctggatttctccgataatcatcggcactgcatacgttgaaaaacgcacatcataggttaaatcaaatttgtcaacagattttaacagcccgatgcagccgatctggaagagatcgtcaggctcatatcctctgtttaaaaaccgctgtacgacagaccaaacaagacgcatgtttttttctatgaggaggtctcttgcctgctggtcgccattttggctttgtttgattaattcctttacttcatgatccttcagctgagcgtttttgccgtttttcttaacctccacatccataacaaatctccttaattacaaagcgctttgctttttgataagtgctttgttaagcgaatcgttgttcccatttcaggcgatgaatcgatactgacatcatccatgaaattttccataatggtaaagcccattccagagcgctcaagctcaggcttagtcgtaaatagaggctgacgggcttcttcaagatctgtaatgcctaagccttcatcacgaatagtcatatatacgacatgatcttccagcgtcactgaaatgtaaactttcccttcacagttctcttcatatccatggataattgcatttgtgactgcctctgacacgactgttttgatttcagtcagttcatccattgtcgggtccagctgagctataaatgaagcaactgtcacacgggcgaacgattcattctgactgagggcagaaaactcaaggtgcatttcatttttcatgatgccacccccagtgtcaggagcgcctgctgttcagattgttcaaatcggataattttaaacagacccgacatatcaaacaatcgcttcaccgcaggagagatagcgcaaacaaccatttctccgccaatttgcttaatttgcttgtatcttcctaaaataacgccaagccccgagctgtccataaaggaaaggtcctccaagttcagcacgatatggcgaatatcatccttctccaatgattgagtcactttttgcttcagggtttcagccgtatggtgatcgagttcgcctgttaatcgaatacaaagcacagattctttgacattcatgtcaattccaaggctcatgctcattcctccttgatatgatcggataatgagtgtttcgatttcgacggaatgaattccttcaccgtgacaaaactagtggtcattcggcataattacttaaattttgtccagtctcccatcgtccgctttaagaatgtgataaacccggctttcttcatatcttcttttgcagcaacaggactttcagcgagtacttctccatcctttttcagaacaagagtgccaagctcttggcctttttgaatcggagcactaatattgtccttcatcttgatttcttttttcacatcgttcatatcctcgccttttttcgtcaatattgaaatcggctcagatgtagtgagttcgatcaatttttgtttcccttttttgacctttacttttgctactgtttgatttcgtttatataaaggatgcgtttcatattgactaaaggcgaagtcaagcatttttgtcacttgcgcgtttctttctttaggcgtgctcgctccgaatacaaccgctatggcccgcatgtttccttttttagccgaagcagtcagacaatatttcgcttcgcctgtatagcctgtttttacgccgtctacaccaggataaaatttgataaggcgatttgtatttacaagccaaaactttttatctgtattttcacgcagataatcttcatacgtgccggtaaacttcgtaattgattcgtatttcaataattccttagccatgattgccatgtcataagcagagctgtagtgtccttcctcggtcagtcctgttgggtttttaaaggatgtatttttcaatcccagctcttttgcttttttgttcattttcttcacaaattcttcttcagagccggaaataaattcagccatggcgacggaagcgtcatttcccgaagcgattgcgatgcctttcagcatttctttgacagtcatttcttcgccgggctcaaggaatatctgtgagccgcccattgacgccgcatgctcgcttgtacggactttatcactcattttgattttgcctttatctaaagcttccataatcaaaagcatcgtcataattttcgtcatgcttgcaggcgccagtctctcattgctgttcttgttgtaaagcacttttcctgtgtcacgttctatcagcaccgcagacttcgcttcatgagcaagctccgatgtacgttttccgtcttgttttgcaaatgcagacggtgcaaatgtaagcagcattataccaatcaacaaagtggataaaagacgtttcatctcaaaagccctccatttcataatcctttttattttttccaagcgggatggttttatacgccactgatggaaaatgtttcgaattttgggcgtaaaaaaagacagctgtgtgatatcagacacagctgtcttttggtcctgcattgattcatttttattcgtactgagcgacgatcgctttaacaagctttaagaatccagcttttactttttcggtcacttccataacttcatcgtgacttaaaggctgatccagaattccggctgccgcgttagagatgcaggaaatgccaagaacccgcattcccgcatgattcgctacaatgacttccggaacagtagacatgccgactgcatcagagcccatcgttcttaagaaccggacttctgccggtgtttcgtaagaaggtcctgtcacagcagtgtacacgcctttttgaattgggatattaaggtctttcgcaatcttttcagccaggctggacagatctttgtcataggctgaagacatatctggaaatctggcgccgaaatctgcttcgtttggcccgattaacgggtttgttcccataaagttgatatgatcggtaataatcattaagtctcccgcacggaattcagtgttgacaccgcctgcggcatttgtcacgatcaacgcttccacaccgagcgctttcatcacgcgtacagggaatgtgactttctccattgagtagccttcataaaaatgaaagcggccctgcattgcaatgacggaaactccttcaagagtgccaagcacaagctgtccggcatgcccttcaacagtagataccgggaattcaggtatatcttcatatttcagcttgaccggattttcaatttcgtccgccaaaatgccaagacctgagcctaaaataaggccgatcttcggagattccggcaggttttgtttaataaaagcggctgcgcgttcaattctgtccttcaagaaacagtccccctattgtaataaagataaaaagcttttcccgtatttcggtttattcgtttggaaattatcagcgatcgttgcaccgatatcagcaaatgtatctgcaagcggcagcatttgcgctttcttatgttttttgctgtaagcgagaatcggcacatactcgcgtgtatggtcagtcccatgatgaatcggatcattgccgtggtcggctgtaataattaacagatcgtcttctctcattttttcaaacacttccggaagccgcgcatcaaattcttcaagcgcgcgtccgtagccttcagggtcacggcggtgtccgaataacgcgtcaaaatcaacaaggttcgcaaagctcagacccgtaaagtcttctcccagcgtatcgatcaccttgtccattccgtccatattagaaaccgttctgcgtgaagaagtaatgccttctccgtcgtaaatatcagagatttttccgattgaaatcacatctaagccgctgtctttcaattcattcatgacagtgcgatcaaacggcttcagcgcataatcatggcggtttggcgtccgtttgaattgacccggctctccgacgaacggccgtgcaataatgcggccaaccatatatttcggatcaagcgtcagttctctcgccgtttcgcaaatgcgatacagctcctcaagcggcacaacctcttcgtgagcggcaatttgcagaacagagtcagcagacgtgtaaacaattaaagcccctgtctccatgtgctcctggccaagctcatccaaaatcgctgtgccggaagccggcttgtttccaataattttgcggccagatctcttttccagctcttgaagcaattcatcaggaaagccttccgggaacactttaaacggtttatcaatgtataaacccataatctcccaatggccggtcatcgtatctttgccgtttgacgcttcttgcatttttccataataggcaagcggatgttctgttttttctacacctttgatatcttcgataagaccaaggccgagctttgccatattcggcatatgtaatccgttcatatgctcggcaatatgaccgagcgtatgagcgccttcgtcattaaagtcagcggcatccggcgcttcgccgattccgactgagtccatcacaattaaaaacacacgattatatttgtatgcaggcatcttgaaagcctcctttttttctatacgtctattgtatcgctaagaggtctgacaactcaagtataaaccgttttcattcccgttgacaatgtatttggaaataatgagaaacttcaatattttctgtcgctctaaacaaaaaagccgcagccacctgcggctatgctcgcggatgaaactgcttgtacacatccttcagccttgttttcgtcacatgcgtataaatttgcgtcgtggatatatccgcatgcccgagcatttcctgcaccgctcttaaatctgccccgttctcaagcagatgcgtcgcaaaggaatgcctgagcgtatgcggagtcagctctttcttaatgccggcttccaacgcgatttttttcaggttcttccaaaatccctggcggctgatctgtttgccgtgatgatttaaaaagagggcgtcagacacattgttctttaacagttttcccctggcttttgtcatatattcctcaatggcggaagcggcggcttcaccaattggcacaatccgttcttttcttcctttgccaaagcatcggataaaccccatagataaatgaacatctgccgttttcaactcaatcatttcactgactcgtatgcctgtcgcataaagcagctccagcattgctttatcccgatagccgaatgggctcgtcagcttaggcgtgtccaataaccgctcgacttcattgagtgcgagcaccttcggaagcgcccgttccgtcttttgtgtttcgatatgaacggaagggtccttatccgttactttttccctgagcagaaattgatgaaaagagcgaatggatgccaaatgccgcgccgatgtcttaccggatttccccgagtccttcaaatactttaagtattggataatatgtatgcgggtaacgtggttccaatccgtcacatgaagggtttctgttaagtagagagaatagcttttcaagtcacgttcataggatacgatcgtattttgagagagccctctctctaccatgacgtagtggatgaaatcctttatttgatctttcactcttgatctactccccgttttggtaaaaaaagatcaaccggtcgagccatccgcctttttcatcctgatccatttcaacaacttttacagcggagccttccggtttatcataccgatgatagttttcatactcttgattcacccatatcatagcataatagaacaaagcggtaaaaccggtaaacaggatgaaaactttcaatgcatcgacagctgttttcaggaatcttcccatgtcctaatcgatcctttcctatggttccagttatataaaccatatgccaaatcagaaaggttttatacatagaaacagcaaaaaaccctttccccatgagaaaaggttcgcgctcggcaccatctattcagtttcttttccattacagcggtggcaaatgccgtgaaacgtcaatctatgatctttaatcttaaatttccaatcacgttcaatgatttcttccacgtcttcaagcaaatcttcttcaatttcatcaacggctccgcactccatgcacaccaagtggtgatgaaagtgagctgcgccctctttccgaaggtcgtaacgggacacgccgtctccaaagttaattttatctacgacttttaattcagttaataattcaagcgtacggtatactgtagcgagaccgatctcaggagatttctcttttacgaggaggtatacatcttctgcgcttaaatggtcttcttcgttttcaagcagcactcttactgtcgcttcacgctgtggcgtaagtttatagctggatgagtgcagttgtttcttaattcgatcaatacggttttccatgtctttccctcctacgccgcattccatgactcattataacaaaatacgcgcagagttccaactataattattataaactgataaataaaacggttttcttttaataataattttaaaaaagtctagatgtaagcttttccattaaaacaggagataagtatgcttcaaacagagatgagatcagcgctaaaaacagaatgaccagcagcacaaaggcataccgcccgaaccattgaatcggcgcgtcatgcaggcttcgtttcacgaacagctgtctgattaactttaaagaaaacgcaattgcacatgtgcccataatgagataagccggaatcagcagcacattttgcggcaaaacggcgacaaatgataggaaaaacccgcttactcccatctgattgactaggaacccgacagtaaagccgacgacgatccctttcagaaagatcataatgaaaataatcggcatcccaatgacggaaattccgagtatccacatcaggcctaaatactttgcattatgaaagatactttgcccaaacatatcagctgaacttgcctgttttccatccgaaagctgtccaaaaaattgacttaagtagtagtataaatcttctttctggctgatggtcatactgttgacaataatcgcgccaaagatgacacccatgaaaaacagcactgacacaaatatataaagagagagatgatctttgacatgcctgagaaacatgtccttataagagatttttcgcataccgtttcctcccgcccgttctagtgatttgatttaatagattgtatgaaagaaacggaaaaacatgccctttttcaaaaagaaacgatagagatgaatgctaggcggctttttggggcacaaaaaaatccttatcatcaactgctgtatgatcataaggattcttatgcttccgtttattcaaaatctcttttttgctttttgtcattctttcatgtgtgctgaaagatggtgtgctgcctcttgataataagacgtcacgtccgccgtttctcaatcgatgcccccgcttctttttcgcttggctttttgccatgtgatcactcccttttttattttcatagtaatgataacaaaattgaacaatgataagaaaaaaacagcacctgctacgacaggtgctgtttagctacatttatttcactgctgtaagagctgcatgctcgacagctgctgctaccgcatgatggacttttgaatcaagcggctgagggacaacatcaccttgtttagtgcaagctgcgatggcctctgctgctgcgacaagcatatcatgattaatctccgtgctttttgcgttaagcgctcctctaaaaatccccggaaaaccgagtacattattaacagaacgcccgtcagctgcatatgcggcgccagcctgcagcgcggcctccggttcaatttccggcttcggattcgataaagccaaaatcacttgaccagaacgtacaaatgccggttttattaaacccggaacgcccgttgtagcaatgacaatatcacatgtttccatgagctcctcaatactggaaactgcctgtccgccgtattgttcgagacgattcattgctgactctgatttgtctgttccgtacacagcattcacaccataagccatgaacatccggcagatggccacgcctgctgcgccaaggccgatttgccccactttcgcttccttcaggtcaacccccgcactcctgcatgccgaaatggcagctgccagcgtcactacagctgtaccatgctggtcatcgtgcataacagggatgttcagctcctcttttaggcgatcctcgatttcaaaacaatgcggcgaaccgatatcctcaagaaggatgccgctaaagcccggagaaatatgttttactgttttgatgatttcttcaggatcactcgtatcaagcagtatcggaatgccgctaatacccgccagctgatcaaacaaagcagcctttccttccatgacaggcatgccagccacagagccgatattcccaaggcctaaaattgcggttccatccgttacaattgcaacagaattgctgatcgttgtataaatagaagctttttcaggttctttttcgatcagtcggcacacgtccgcaacacctggtgtgtagacacgtcccagctctgccagtgaacggatcggcattttgcttttcatttggatttttccgccttcatgtgcggacaggacttcatcagatacggtgtgaagcctgatcccttctccgagggcctgtacagccgcgatcacttcctgaagctgttcttcattctccacttgaacggtaatattccgcattgtgtaattgggtccgacttttaccgtctccacttcaccaatatccccgcccagaaggccgatggccgtagccacccttccaagatttccgggaaccgaaggcgtttcgatcatcagtgtccgaatcatgtgtttcgctatcattcagtgatcctcccctattagcctagtttttcggctttaactgtattgtttttcgtataccatataaattttcctgtataaccatagataattgcaagacctattgctacaaaactgagccacataaacggcagataagagaaggtagaaacacctaaaataccagccatgtaaatcccattatcagaccaaggaaccatccccgaagtcaatgttcccccgacctctgagttacgtgataacactcttctgtccagatgtaagcgatcatagctgtcttccataattttcggagtcaaaataagagatacatacatcgcacagccgaagatgtttgctaaaaacgctacgatcagtgtagacaatgtgacattgccggctgaagttaatttcttttcaaacgttgaaacaatgacttttaacacgccgagtttctcaagcagaccgccaaaaccaaggccaaagatgatgacgacgagagaatcaagcataccgacaattccaccgcggtttaacaagccgttcaaaaattcaacatccgttttaatagagaagccgttgtacgcagttgcaatcgcatgggcaatatccattccttggaaaacaacagcccagattgcaccgagtaaagcgccaattacgataaccggcatagatggctttttcatcgccaataagactatgacgagaactgccgggatcagcatccaaatatgaatgtcaaacgtgttttgcaaagatgattttaagaattcaactttatcaagatcaatatttttcccgccgtacataaatccaacaactgtaaagagtatagctgtaatgacataagcaggtattgataaataaagcattgctctcacgtgagccaatacatcgacttttgatagtgaagaagctagaactgtactgtcagacagcggagacagcttgtccccaaaataagcacctgaaagaatagctcccgctactagaggaagcggaatgcctaacccctctccaattgcgatcatggcaatgccggcagttccgactgttccccatgacgttcctgttgccacagacataatggaacaaataattaacgttgccagtaaaaagatacttgggtgaataaattccagtccgtaataaatcaaagtcggcacaacgcctccggcaatccatgttccgatgagcgccccaactgaaacgagaatcagtacggcttcaaggccatttgatatcccatgtacaatcgcattttgtaaatctttataagaataaccgagtctaatacctaaaagcattgcaataaaccatgaaacaaaaagcgccagctgtatcggcaagtcgagaaagactgtaaacgatagaacaagtgctaaaaatactcctagtacaataataatttcaaatagtgttggcaatcttacatccttcaaaagaagtcccccttcatgtaaaagctaaaacgctttcaatatatagtgcaacacgtatactatacttcctcatccctatgttgtaaacagcttattcatccgactattcggagatgaataagctgtattttatacaaattttatttttctaatagttctttccctgcgatacctggtttggtcatctcatatgggtttaaaataatatccaattcttcttctgtcagcacatcatgctgcaggcaaaggtcacggactgattggcctgtcataatcgcttccctggcaattctggcagccgcttcatatccaagatgcggattgacagctgtgatcacgcctgcgcttttttctacgtattgcttcaaccgcttttcgttggcttcaatgccttttaagcagttgtcagtgaacgaacggaagccgttgttcatgatgctgatggattgaagcaaattaaagacaagcacgggctccatgacgttcaactcaagctggccggcttctgaagcaaggcagattgtattgtcgtttccgataacctggaacgcaatttggttgatcagctccgccataactggattgactttccccggcataatagatgaacccggctgacgtgcaggcagagaaatttccgcaagtccggcgcgcggtcccgacgccattaagcgcaggtcgtttgcgatcttcgacatgttcatcatgcagacttttaatgaagctgatacctctgtataggcatctgtattttgtgttgcatcaacaagatggtcagcgccgacaagaggaagcccgctaatatcagcaaggtgctttactacctgtttgatatattcaggatcagcgttcagccctgtaccaacagcagttgcgcccatgttgacttcatacaggtgctggcgcgattgcttgattcgtttgatatcacgctcgagaacacggctgtaagcttcgaattcctggccaagacggatcggaaccgcatcttgaaggtgtgtccggcccattttaataacagagtcaaactcctgtgctttttgcttaaacacactatgcatatcttccattgttttcagcagtttttccaagagcttcaatgtggaaatatgaatagcagtcgggaacacatcgttcgtagactgtgacatgttcacatgtgtgtttggacttaaatggatataatctccctttttatggcccatgatttcaagcgcccggtttccgataacctcattcgcgttcatgttcatagaagttccggcaccgccctgaatcggatcgacgataaactgatcgtgccacttgccttccagaatctcgtcagcggcttgtacgatagcttggccaattccttcatacagccgtttcacgtccatgttggcaagagccgcagcttttttcacaatcgccagtgcgttaatcatttcctcatggattttgtatcctgtgatcgggaaattttcagaagcacggagcgtctgaattccgtaataaacatctgcctcaatttgtttttctccaaggaagtctttttccacgcgatattctttttggccgtttaacataatctttaaccttctttctctttgctggttatcgtttttacattttacaggacaacgtcatcagcaatcggtgtttccataattctcttgacgacaggaagatccgaagactgacctagtgcccacatcaattttggcacaattgcttctgtgttcatatttcttgatcggataattaagtcttggttgaccctgcggccaacttcgtaaatgctcatgtcttcgccttcttcaagacattgagtcgtaatgacgacgacaatgccgctttcgatcagttcattcacttttgacaaaatgtctctgccttcaaacggcacccctccgctgccataactctcaatgacaatccctttgtacatgcttttcagggcatcaaacatttcaggctttaagcctggatgcagcttcagcagacatacatctgtgcatagtgaagtgtcaactgtgaaggtgtcgttctcaggttccgttacttgtttgttgtattcgatcccgtcttcattgataaaagcgatatatgggtaattgatgctttcaaatgcgtcgtagcttttcgttcttaatttgatcgcacgcgttccctgaatgactctgccgtcaaacacaacataaacgccgcccacgccttcacaggcaaatcgaatggcatctgtaatattttttttggcatcggttttttggaacgtgatcggaatctgcgagccggtgatgacaatcggctttttggcatgctgcagcatatacgatagtgcggcagatgtataggccattgtatctgtaccgtgagtaataacaaacccgtcataggcatcataattttccttaacggcttctgctatttccacccagtattcaggctgcatattggtgctgtctatattcataagcgactgagtttccattgtgtaatcgttatcaagttttgatacgtaacttaataattcatcagccttgactccgggagccagcccattttccccttcaactgaagcaatcgttcccccagttgtcaacatcaataattttttcataccatgcacctcttcactgtatctaaagatgggttgcgagaaggtattcgcttttcgcatacttttaatgcaattatagacacggaaaataaaatacgcaagacattattattcaattcgcgtacacttcctaatacctatatgatataatcagctcaaggtgaaaaaggagcggaagttcatgaatctagatcgtttaactgaattgagaaaaaagaaaaattggtcgcttcaatatacagctgaccttctcggtatcgcaaaaagcacatatgccggctacgagtcaggctaccgacggccttcacttgaagcgcttgccatgctggctgacctctttgacacaacctgcgatgaacttttaggccgcgagaaacaaaagcagactgctcctcaggccatagaattggccacgtggagcagccttgactttaccatttctgttgatggccagccgctgagtgaagatgaaatcatccagctgattacctttatacgcacaaaaagaaaagtacaggaggaactgagttaatctttagctcacggtttaattttaccgtaggttcctcctcctccggctttcaattccagttttccggatctcgcttttacgataagcgccgcagttttcggcgggacaatgcgagccaaatcttcttctgcagcctcatgaagaacagccatttctgttccgaaggctttttttagtttgtccagcgttttcgggcctacacccggaacaaattgcagcgggatctgatgtacatatcgcggacgcgggacgcgaacttcaagctgatcactcaattcacgcaatctttcgctgactcccttggtaaatctggcatttccgcaattcgcgcacgctgtttccccgcttacagcaggctctccgcacgcttcgcaagcggtctgataatatttccccaataacgggtccaagccataatttgcgataattttcctgtcatcttgtccctttaatgcaagagcaaattcagtaaaatcagctgactgcacatatagttcattatattctctgccgattttccccaacgaatgcgcatcagaatttgttaaaaaaggatacggattcaattcagatacctgtgatgccatgtctgtatcacagcttaatccaagctccaccgcgtctatcatagatggatcaaaaacctcagttaagcttgatttaaccccttttccatataagcttttatgcggcgtaaagatatgggcggggataaacaagccgcccatatcctgcacttttttttgcaggtttaagcccgtttcataaatccgctgcgagcttaaatgaatatttttcagccgggctgacagccagtttgaaaactgtttcatatcagccagcgtcggcataaatacgagcacatggatcggtccgctacaggcttcatcataaatctccagctcgctccccaataaaagagtcgtgctgcgataacggattcctcccccgtcaagctcgcgatattttccagatgaaatgccttcctcaagctctagaatgacttccggagaatgacagtcgataatgccgaggagttcaattcctttatgttcactggcttcaaccaaaattctgtccagtgttaatgttttagcgcctgttattttgacagcccttcctgtaaaggtccggccgatatgaatgtgcaaatccgcgtaaatctttttcatttttgtgcttggagcgcttctttcagctgaagatactgaatcgcgtaggctgttttagcatcgtatacttcacgcgattcaaccagctttagcgcatcttcaagcgtcacctccatcacttcaacaaactcgtcctcatcaagctcccgtttttcttcaagcacagaaagctcctcagcaagaaaaacgtgaacgatttcatctgcaaatccgggtgatgtataaaacgcagttatttttgtcagtttttttgctgtataaccggtttcctcttcaagttcccgaagtgccgtatactccggctcctcacctttttcaagcttaccggccggaatttcaacgatcgtccgctcaagcggcttacggaattgtttgaccaggatgattttcccttcatctgtgacggctagtaccgctactgctccagggtgtttcacaatttcacgtttactggctttgccgtttggcagctctacatcctcgacataaagatcaatgactttacccgaaaagatctgttctttggcaattgttttttcttctaatgatttcatttcttcatctcccgttctgtctctatatgatgccccatacattttatcatactagagcaaaagggggcttcttcgtgaaagtgcaccgcatgccaaaaggtgttgtcttagtcggaaaagcatgggaaattcgggcgaagttaaaagagtatggacgcacatttcaatatgttaaagattggatctcaaagccataaaagttgaaactttagctcctttatattacggtcaatacaaagcctaaaaaaggagtgtgcacatgagaaagcgcaaattgggtacatctgatttagacattagtgaagtcggactcggctgtatgtctcttggaactgaaaaaaacaaagcattgtccattctggatgaagcgatcgagctcggcatcaactatttggacacagcggatttgtatgaccggggacgcaacgaagaaatggtcggtgatgcgatccaaaacagacgccaggatattattctggcaacaaaagcgggaaaccgttgggatgacggaagcgagggctggtattgggacccttcaaaagcttacataaaagaggcggtaaaaaagagccttacacgtctgaaaacagattatatcgacctttatcagcttcacggcggcacgatagaggacaacattgatgaaacgatcgaagcgtttgaggaattaaaacaagaaggtgtcatccgctactacggcatttcttccatccgcccgaatgtgattaaagaatatgtaaaaaaatcaaacatcgtcagcattatgatgcaattcagcctgtttgacagacgccctgaggaatggctcccgcttttagaggaacatcaaatcagcgtagtcgccagaggtcctgttgccaaagggctcttaactgaaaaaccgcttgatcaagcttcagacagtatgaaacaaaacgggtacttgtcctattcattcgaggaactgacaaatgcccgcaaggcaatggaggaagtggctcccgatctttccatgacagaaaagtcgctgcagtatctgctagcacagccggctgtcgcttcagtgattacaggcgccagtaagattgagcagttacgggaaaatattcaggcagcaaatgcacggcgtttaaccgaggaggaaatcaaagcgctccaatctcatacgaaacaagacatttacaaagctcatcgctcatagcagaaaaaccagcacccgtacaggtgctggtttatttatattgatgccaatccatttggctttcatttaggagttcttcaaagctcttatttttttcgatctcttttttctttctgatctgttctgctttttctctttcctgcctcttttcatcctcttccttcaattggctcttcatctccataagctttgctttgatatcggattgaaggccgtcttttagctggtgtttgtcagcaagatttttgttttttcattcagacttcccccatgttttgttttgaagacagtttatcacggagcatatacactgaacaagccgactctcttctgatcactttctcagcggagcagtgtttaggtataatgatttcaaacacgaattgcctatatatttagttgaaaggtgctgtgacttttgaagaaaatccttttggccattggcgctctcgtaacagctgtcatcgcaatcggaattgttttttcaaatatgattctattcatcaagaaaaaaacggatgaagacattatcaaaagagagacagacaacggacatgatgtgtttgaatcatttgagcaaatggagaaaaccgcttttgtgataccctccgcttacgggtacgacataaaaggataccatgtcgcaccgcatgacacaccaaataccatcatcatctgccacggggtgacgatgaatgtactgaattctcttaagtatatgcatttatttcttggtctcggctggaatgtgctcatttatgaccatcgccggcatggccaaagcggcggaaagacgaccagctacgggttttacgaaaaggatgatctcaataaggttgtcagctggctcaaaaacaaaacaaatcatcgcggattgatcggaattcatggtgagtcgatgggggctgtgaccgccctgctttatgctggtgcacactgcagcgatggcgctgatttttatattgccgattgtccgttcacatgttttgatgaacagcttgcctaccggctgagagcggaatacaggctcccgtcttggcccctgcttcctatcgccgacttctttttgaagctgaggggaggctatcgcgcacgtgaagtatctccgcttgctgtcattgataaaattgaaaagccggtcctctttattcacagtaaggatgatgactacattcctgtttcttcaaccgagcggctttatgaaaagaaacgcgggccgaaagcgctgtacattgccgagaacggtgaacacgccatgtcatataccaaaaatcgggatacgtaccgaaaaacagtgcaggagtttttagacaacatgaatgattcaacagaataaaaaagcgaaaggcctattcggctcttccgcttttttatgttacagaacgtcggtaatgccatccatattttctctgatccattcaatcgcaagatctatcgttgtaaactcctgcgtctcaaaggtcatttcatcctgcaatagccagacatctttcttgatggactctgctcctccgattgaccagtgaagcaaggtatagggatggttttgattcaggaaggatacccacgttttattttgtgctgtgttcttcattgccttcagcttttgttccacgtttcgcgtctcctactttactaatatgctcattctggggctgagcatttcagccgggcttttcagcgccaatgttttggctttttcattgtaatcgatcgtcatttgatcgtcaaaaaacactttttgtgacgattggatatacagcggaatgccgttcgtttccagctgctcgcactgtcccgttaattcttctgccagccagattgtggggacaccgcttaccgcgcagccgcatccttctgcatcgtaacgaagctgggctttttttcccgggttggcgtcaaacgcctgctgcagtgcctgttttgctgcatctgtcacatgtatgttcataaggtgaaacccccgttttcatcattttcgctattgtagcatacaacactgccattcgcattgtttctgccttttttccaccgcttcgcattttcttctgcagtcttgatccactcatctttcccttttatgtactgattgatgctgtcaggatgctgggccgccagccgttttttgagaacggcgtattctttcgctatgtttggatgagctctgagataatctctgaataacagatgcctttcaatagcagggtttccctgttcgtacatatggacatgatgagtgcgtttatttccgcccttttggaaataacgcctgcccgctatgccgttctcaccttttggtgtatagccgttagccttcatttgttcatcaaattggctcacggcttcaatgcttctgacttcaattaacatatcaatgattggcttcgctgccatgttcggtatcgatgtgcttccgatgtgatgaacagcgataatctccggcccgaacacaagtttcagcagttctttttcttcatcgaaacattctgcccatttttcgttgtagagaatgacctcaacttttcttttcggatacaaatgaaagaccgacagcaatagaccctgcgctgctttgacggtttctgccttttggaatccggcctgtgtatagagtgacacggccggggtattgttctcggctgtgactacttcgattttctcagcgtcttcattatgatcaatgacaaattgcagaagtgctcgtccaattccttttctgaaaccgtcaggatgcacaacaagcctgcaaatggtgagatgatgcatgtttttctcatatgaaatgacaccgatcagcttgccgtttttccgatatcccgcaaaccgttcatgggatgcttgaatatccttcaccttctcttgtaaagcgggaataccgtcaaaaccgataatctctgtttcctttatgtaggcggggatctgtacggctaaaatctcacgcgctatcgtgtcttccttatgctggagaaattcaatcattcgtgttcctcctgaaacagccgctgtctttcgacttttgcgacgcggactgcatacgactcgtaccaaaggctttttcctttttcttttgccgcttgatgttcagtgtgatgcttccaatggttaattgcgtccatactgtcccaataggaaactgtgatgccccttccatccgcttcacgtacgctttccacgcctaaaaatccaggctgatccgccgcaagtgataccatccgctccgctgtttctccatatcctgtgtcattttcgcttttgacagaagaaaaaatgactgcatagtaaggaggctcaggtgtttttgataaaaaatccatcatatttccccctcatatgtttttgacaaacagtaccctgtcttgacccggaccatcatagtttgcaaacactgagatgccatttaccgtcttggtgcccttttcaatatcaaaccccaattttgtgtgatatgcgattgataccttattcacaggtgaggtgacgcactttacccgggtgcagcctctttgttttactgtttcgataaatacatcatacaattgtttacctatttgcatttttctgaaatctggatgcacaccggaaaaatgaatgtacgccgtttcaggatccgattgcgattgaaatccgattaaaaatcccgtcatgctgttatgttcggatgtaataaagcttgtgtcctgaaaatgctcaaaaaatagtctcggcaatttttctttcagctgtctgccgccccaccattcattcagtacagacgttaccatttcataatctgaagacgtgattgttcgaatatccattacgatttgatctccctccgtctggcaaaacgaatgtcagctctttttctcacaatataaaaattatattttgcctggctggaattgtaaatgccttctttcctgtatcatacgtttccagactgccgagggaacaatgtttgatcattttacgcctatttctcccccaaacaggaggagagactttacagcacaatatcaagcacttgatcaagtttcagcttataaagctgatcctcgtctccttttatccatactgctttttcaaactcttcataccggcagattttcccggtgcagcagacaatctcaccgtcctgaaagcagctgacagtgatatcctgagcaaactccatcgcggtgcaaagcgtttgattcatctcttccagcttatcggggtcaaggatcggcttttgcagcttctgtttaagtcgctttctctccagcaggctttgcttatgttccggcagaaacatcctgctcccttcccacagcaggttgcccctttttaaatgatcgttcatttataatgcccccctattttagccgcacgttcaaatgcctggcctgccgctgtcagtgacgccgccctgatgattgctgtgtcgccgaatcgatttttaatgccgtccatcacatagcctaggctcattttctttgcataatcctgaaataaattgagctgccatatgtcatcagatgagagctgagacagattgacaccgagacggcggacaggtttcccgtcccaaaatgtaagaaacagccggcgtacagcctcatatacatcctgcgtagaattagtcggctctgccagcttcacttgccggttgaagcccgtcggccaatcaaaatcagcaccccggcagctcactgacaccgtctgccccatgaccccggcgtttcggcttcgcctgcacacttcttcactcagctcaagcaatacgaccttgatttctttgtcaaagtgttcgtagtctctcgggagagtcattccatggcctatcgccttttgcccgtccagagacgaagttgacacaggggaatagtcgattccgtttgccgtcatccacagcacgtggccgttaatgccccatttcttttttaaaagatcgagcggaaaagccgcgagcccgccgatcgtgctgatgcccattcgatttaaatgatgcttcatgcggctcccgacgccaaacatgctgcccaccgggagcggccacatttcggttttcatattttctttcgttaaggtaaaaataccgttcgtattctttttggcaaaattgtcacacgcaattttggccagcgctttgttagggccgattccgacccgtgcataaacgccgatctcccgcatgattctgccctgaatgcttttcgcgatctccatcggcgtcccaaacagcttctggctgcctgtaatgtccatgaactgttcatcgatagaataaggctccacaaggtctgtatactcctcgagaatggccgtaatttgcagtgatacatcaatataccgctgcatacgcggccggagcacaacagcctcaggacacttttcctgcgcctcccacagccgtgaagcattcaccacacccttttgtttcgccagcgggcaggcagccaatacgactccgccccttttttcagggtcacccgaaacaatgacgggcttatttttcaaatatggattttccgctttctctacagatgcataaaacgattgcatgtcaacgagaaaaatcactttttctttcatcatacacacctctaaaaagaacttatgttcgtttttcattatatgcgaaagtatgttcgttttatactggtaaatgattcttgtctgacagaaaatatgatccaagggtttgagagaagaaaaacatttagtagaataaaagcgaacataaggataggagagtcatgatggagaaatttgtcgaaaaaatgatggaacaggcattgcgtcaatacggcagaaacgttgctatagatccgttaagcccgtatgaaaaacaaagcctgaaagcggctctacaagagagacggaatgaagaaccagatgaggatttgcatgcgcatatagaagatatcatttatgactatgtcacaaaccaaggtctgttctcttaaacgcatgactgtcagttctttcagccgctgatgcggcttccctttgaaaacaccgcctgaaacaaataaacagtctcaggcttacagaaaaaagcaggattttctcacgctccatagattcatatggcctggcgtaaaattccccctcagaactcgcgcaaaacggaataagctgtccatgatcacgcgtatacactttttcgaagagatgtgctctcttgttctgtcatgcggtccatcggttttcagcttacatcttgatctcatagccggtttcactgccgatatgatctacgtcctggcggcttaaactaacacaccctcactgaccaatcgctttgcttttcatcggacatcccgtcatttttcttcttcaatttcaagatgtaaactccgtcagccacacgcatcctcaacgcatagtatattgccatccatacaatcaggcatactacatgtcaaaaacgaaatattttgaatgatctattggagaaggaaattttttcatatatgatagaggaagatcttacatacaggagagaatataattcatgaagaaatggaaagatatccacccgatcagctggacaattataatcggaaccattttcggcagaatggcaacatcgatgagcattccttttttagcgatttatttgacagccgtccaaggcgcatcagcttcctatgcagggctggtcatcgccgcgagctcatcagtcggcatcctcgcaagcttttacggcggatatatctcagataaattcggcagaaaaaacatgatgcttgtatcgattttcggatggatgctggtatttgcaggctttgcggcggcatctcatctctgggtgttttttgtagttaacgcattaaacggtctttgcaaatcactgtttgagcccgcttcaaaggccttgctgtctgatatgacagaagaaaaaacgagactgctagtttttaatttacgctatgcagctattaatatcggcgttgtcttcggacctgtgcttggcctatatttcggctcatcgcaatcgactacgccctttttggtgcctgcagtcatttacggactatacggaattgtgcttgccctccaatttaaaaaacatccatccttatcagcaccagcccagtcccgaaatatgagcgtgcgggaagcgtttatggtcacgcaaaaggattatctttttaccattgctttggtcggcattacgctatgcaccttcggctactcacaattcagttccacattccctcagtatatggcgcagaaccccttgatcggcaatggaacgaagctgtatgggctgatgctgacattaaacgcaatcgttgtgttggcgacgcaatttcccattgtccattttgcaaaacggttttcgccgctttgttctctgatgctcggtaatgtgatggttagcatcagcatggccattttcaccgtatcgcacggtgttccatcaattgtgatgattgtcatcacatttacaatcggcgaagtgcttttattctctatgatggatttgtatgtagaccagattgcaaaaacagggttaaaaggcacttatttcggggcaatcggtttttcacagctcggaaacgtcatcggcccttgggtcggggggatatgtatagacctgtttggcgctggccgtccgatttatattttttctgtcctgagcggcattaccctgctcggcctgccatttttagcgttcgcctatcggcagatgaaaacggagactacaaaacaccgttcccgtctggaaaagccgctttaaataaaaaaacgggagagaatcaatctctcccgcaacaatgaggtgatgaacatgaatataggcgatatgatgtttcagctgtttgtatttattatatttgccgctgttatctttgcggctgttacaggcttcaagtatgcgaaaaaccgaaaagcgcagctggatcgcattgagaaaaagctgaacagcctgtccgaagatcacgattaacagcttggggcaacgagctctaccttaatccgatccggatcctcacaatagactgcataatgcccgtctcctccggcaaaaggatgcctgtctcggtacaacacacgatagccttttgccgtcaatttttcggtcatctgatcgacttgatgcttggattcagcataaaatgcgagatggttcagaccgactcggcatctatggtattccggctctagaaatggctctttcgcctgcacaatcactaggtaaaaacgatctttcttccagctgatgcctgagctccatttttgatactctttatagccaagttcttttaagaaccagccccaaaaccgcctagacgcctccaaatcagagacatacagttcgatatgatgcacaatttcataccctccttaccagcacttcctcgaccttatgcccgtctcccttacgcaaaatgagatctgacctgaatttagtcggcaaaatattttcatataaattcggccggttgacactctcccaaatcgaggctgccatctcgtcagcctcctgatcggacaagtctttaaatttatgaaaatatgaatcaggattttgaaaagcagtttcccgaagcaggcgaaaacgctctaaataccaagtgaaaatccggctttcctccgcatccacataaatcgaaaaatcaaagaaatcggaaacaaaaatacgcgggttttcccggtcatcctccaaggtgggcgactgaagcacattaatgccttcaataatcacaatatccgcctgttctacaacctcgaacacaccttcctcgcggtcataggttagatgggaatacaccggggcctttacgctgtcctttcctgattttaagtcattcaaaaattcgagcagcgcctttacatcatagctttcaggaaacccttttctagacatcatatttttctttttcagctcggcagtaggaaataaaaaaccatctgtcgtgataaggctcacttttggacggtcaggcaaacgcgaaagcagcttctgcaagatccgcgccgtcgtgctttttccgactgcgacactgccggcaatgccgataataaacggaattttggctgaatgtggatgcttcaaaaaaacattgacatgcttattgcgttcagccgcagacttgacatgtaaatgaagcaagcgaacaagcggaatatagatcgtttccacttcttcaacagatagataatcattcaatccttccacagcttttgcctcttcttcagatacagcaatcgacaaatgccccccaaaaccagaccaagactcccgattgtgctgtgtatataaagtatgtaggttaagttctttatttttcactgtttacacctgactctctgtaggttaaaacccttacaaagattgtaacggaaaaccttttcactgtctgcttatttttcatttcgtttttttagcaaatcagcaccaattcggttatacgcagccatttcatcttttggaaccatgcttcctcccgttccccagacgacatgtacagcatgttccatcttatatttttgaccatagcgccttccctcttctgtcgaaaaaagctgaaccggcccgaacatgcccgcaagagcagagggctctaaatatttatcttcagatacagccagcatatgaagcaaagtataaagcgtattgtcctctaccgtataacagccgctcagaagcggttcaatcagcttgccgacaaatcctgacggcctccctacggcaagtccgtcagcagcagtctgattatccaggccgatatcctggacggagatcttttcgtgaagtcctgaataaagccctaacagcatacaaggtgaatgagttggttctgcgaaaaacacatgaacatcatctccgtataaaagcttcagcccaaatgctacaccgcccggtcctccgccgactccgcacggcagatacacaaacaagggcgtctcaagacttggctttatattcatacagtcaagctgcgtttttaatcggcttgcagcaacagcatatcctaagaacagctgtcgagaatgttcatcatcaataaaataacagaatggatcatgttccgcctgccgtctcccttcgttcaccgcttcgctgtaatctgtttcgtactccataacagtgactcccttttgacggaggagatcctttttccactgcttagcatcggcggacatatgcactgtcacgcgaaagccgagtgccgcgccgatgatgccgatgcttaaacctagatttcctgtcgaaccgacagcaatcgaatagcgggagaaaaacccggtaaaccgctcttcctgtaagatgcggtaatcatcggtttcctgaagcattccttcttgaagcgcgagattttcagcatgctttaacacttcataaatcccgcccctcgctttaatcgatcctgaaatcggaagctcatggtcgcactttaaaagccatcttccgggaaatggctgctgatatgccgcttccagctttcccttcatatgctgcacctcaaaaagcggagactcgatgattcctttagcgcctttcgtctcaggaaacacctcggcaatgtaaggtgcaaaccgctgcattcttttttccgcttccgctatctcggttgcccactcatctgcacggggtaatggcccctctttcttgcctgaatttgcccagaatacaggctctgcatcaatcagtttctgaataaacggatctttaagcagagcatgaaggacttctgaatgaactgacattcaacaatctctcccttccactatcaaaaactgccccgtgagaaacaagccactccaccacaggcagttctatcattattttttcatgagcgcgcgtcctgccagcttttctacaagagctggaaacagctgatacagcttagtgccggcattcattaaacgcggaagattgatctcccgctttttcgtaaaaattgcagctgtaatttgagctgccacgtcatcaggatcaagcatccagcggccgacatttttggcgtagtccccgcctttatcagcaatggaaaaaaagtccgtctgaatcgggcccgggttgactgttgtcacataaatgccggttcccgaaagctccatccgcaaagcgtttgagtaacctaacacggcatgtttggtcgcggaatacaggctagacttcggtgttgcgattttccccgcttgagaggcgatattgatgatatgtccctttttttgctcaagcatctgcggaagcaccgcttttgtacaggcgatcaggccgaagacattcacatcaaacatcgctttcatgtcatccaatgtagagtctaaaaccgtttcaaatataccgaagcctgcattgttaatcagtacatcaaccgagccgatctgatcgcggacccgggcgatatcctctaggcggccgacatccagaggaaaaatctcacactgtccgctccattcctcggttattttccttttgatttctatcaaacgatcctcgcgtctagccgacagaaggacatgggctccttcagccgcgcataagtatgcgattctttcaccaagccctcctgaagcgccggttatccaaatcctttttcccgctatatgtttcacccatttcacctcttcattgttttaaagtatgcggtatttccttcccaatatgacgtgatggcttcttcagcctccaacacatcaaggtgacctgccgtttctgacatcgttaaaaacaattccttttcatatacagcaggaaaaagctgctgacagacctgaaaagcggtcatcggcttttcatccagcatgcgacgcacatcctccgtcctgttcctctgcttgtcaaaacgcttctcaatcagcgcttgtacactggtgataggctcgccgtgaccaggaaatacgattgttggatcaagttgagacagccttcgcaatgaccgctgataatccactaaaggctttgacctgacgtcccccgctttcggcgcttccaaaatcggattagacgagctgtttgccagcagtagatcgccgccaagcatccttccgcttttttcatggaacagaacgatatgcgattcagcatgtccaggcatctccaacacggaccagccctcaagcccatctatgcccataccttctctgattgtttttgtcagagatctcgtacaggaaaatgcgtacgctgatcgaatcagcttttccgccttccccgtatcaaatggaacgcctaattcaggcagcagcttttgaaaaaaacgtttttgccaatccataaaggcttgatctcggctgatataaggttcgttgaatgtatgcccaatcacttcgatttcatctgaaaagacatcaagcaagcctgcatgatcagcatgatggtgagtcagtacaacctgctcgatatctgacattttcacatttacagcggcaagctgctcttgtagggctctggcagcctcttttgtattcggcccggcatcgataagtgtcagtgcatcaccttttacgaggtaaacgataacatcgccgacagcaaacggcgtcgggacgcggatcgcaattacatcttcagttgtcatcctttcgctccttgtcttcattcattattcatattttagctttttctcggtcttgtgtcattattgcagaatgagaacaaacctttttgaaaaagctattgacattagcttatccgccattgcataatgaacaacaaactaaaacgagaaccattggaacgctatgacgaggaatagtatacaaggcaatggcctaagagagcgatacccccggctgaaaggtgttgcggcccgcttgtttgtagaacctgccctcaagtcgcggttaggaaaacctaaacgtttcccgcgttacgggatttgagctgagcacaatttgtgctaatgagggtggtaccgcgaaccttttcgtcctttacgtgatgaaaaggttttttgttgttctgatagaaggaggatatcaatgaaaaagataggatttgtcggcgccgggtcaatggcagaagcaatgatcaacggcattttgcaaagcggcatcacaaaaccagaacatatctatattacaaatcgctcaaatgacgagcgtctgattgaattaaaggaaacgtacggcgtgcgtccatgcagagataaaaatgagtttttcactcacaccgatatcattatcctcgctttcaaaccgaaagacgcggcggaaagcatcgacagcatccggccgtatatcaaggaccagcttgtcatttcagtacttgcaggccttaccatcgaaaccattcagcattattttggcagaaagctcgcggtcattcgcgtcatgcctaatacatcagcggcaatcagaaaatcagcaaccggattttccgtaagcgctgaagcaagccagaatgatattagtgccgcaaaagctctattgaaaacaatcggtgatgcaacactggttgaggagcgagatcttgacgctgtcactgcaatcgcaggcagcggcccggcctatgtgtatcgttatattgaggcgatggaaaaagcggcacaaaaagtaggattagataaagaaacggcaaaagcactcattttgcagacaatggcaggggcaacagatatgctccttcaaagcggcaaacagccggaaaagctgcgtaaagaaatcaccagtcctgggggcactacagaggcaggtcttcgcgctttacaggactcccgctttgaagaagcaattattcactgtattgaagaaacagctaaacggagcgcagaaatcaaagaacagtttgccgttgccgccttagagagacattcttagatgtaagacaaaaacagaaggcactgtgccttctgttttttatttttcccgcagcagctggccggcagattctgattgctttaatagcgcggagatcgtaaatgaaagcaaatcgggaagcacttcaaaggaataaggcatatacaatctttccgtccatttatgcgggtctttaccagccggaccgacatttaaaaccggaacatataaagcctgatttttaccgcttggcaatgaatatcctctgttaaagagcggcatattgcttgtgtatgcatcaacctcctgtttttccagctgaagataactcaagtccgaaagtccggggaagtactgaacctcccgtaatgcaatgccgtatcgctcagccgcataatgctttatctgatctgctgtatttctgatcaattgatcatcctttgaagaaacagctggataaagcggcggactataaaacagaacgatgagcggcgcatcctccttacaaagcgaagcaagctcagaaacaattttcgtcgaaaaatccctgtctccaagctcccccctgttagcaaaggcataatttagagcccgctctgtttccgagatccccgcacgcttttttgcacgcgagaccagctcatcaaatgtcaaaacagtgacgtcccgctcaatcggctgaaatggctcaaattgttgaaaatcctgtgttttcttccgaacgttcgacatgatttcctccgccgcctgttctgctgttttaagcagcatctgatgcagctcactagctgagcgtttcattgacagcacattaaataatgtgacggctgtatgcggtgtctggactgaatatgcctctttcaagtccttttgcattaagtttaccggcggcggagtgacctcgccatcaaccttttcgcaataatcagcattcagttcaagcaaacggttaatctcagataccattaaatttgcgtttaggcctgaaaacggctctccaacatgtgtctcaatccccttgcagaaaaaacccgcaagcaccttgccaatgcttcctgtataaaaatattgctgctggtcgccgggaaatttttcaaacatcggttcggcattcaggcaagcggttaatgtgatatcatgctttttctccatctccttcaatgcaggaaccgcttcaatcatgcctcttgaattcacttcctcgtccggaaccgttatcaacagcagattgccctcaaaatgcccgttcattgccctctccagcatcgacagttgaatacaaagccccgctttcatatccatcgtccctcttccgaacagccagtctccgctttcggcatctcttctcacacgttccgggagcagctcttttttctctaaaaaggagctcaaaagctcagcaggcttgcaagccatatgtttaaattcgccgtaatcttctatgtcaacgacatcaaaatgactcagcagaagcactgtctttttgacattcttctttttgactagagccgtaagaaaagatctgccatcgtccatcggatgaagtgttacatcatcagggtgcttttgaaaatagggcttgtccttcaaaataaaataaagatactctgcaagcgctgcctcgccctttgaaccggtgatgctttcgtattgcacaagagaagttaaaagtgccagcaattcgtccttcgtctgccaattcattgattccgcccctcctatgaataaaaatgcttctatactgaaaaataaactgatttctcgtctattatacagaaatgtttgacaaaagcggttcatttgagcagtttatatgacgggaaagaaatgacttgatataatcaatctctaaaaaccttacgggaggcgaaagaaatggccagaaaattatttacacctattacaattaaagatatgacgttaaaaaaccgcattgtcatgtcgccaatgtgcatgtattcttctcatgaaaaggacggaaaattaacaccgttccacatggcacattacatatcgcgcgcaatcggccaggtcggactgattattgtagaggcgtcagcggttaaccctcaaggacgaatcactgaccaagacttaggcatttggagcgacgagcatattgaaggctttgcaaaactgactgagcaggtcaaagaacaaggttcaaaaatcggcattcagcttgcccatgccggacgtaaagctgagcttgaaggagatatcttcgctccatcggcgattgcgtttgacgaacaatcagcaacacctgtagaaatgtcagcagaaaaagtaaaagaaacagttcaggagttcaagcaagcggctgcccgcgcaaaagaagccggctttgatgtgattgaaattcatgcggcgcacggatatttaattcatgaatttttgtctccgctttccaaccatcgcacagatgaatacggcggctcacctgaaaaccgctatcgtttcttgagagagatcattgatgaagtcaaacaagtatgggacggtcctttatttgtccgtgtatctgcttctgactacactgacaaaggcttagacattgccgatcacatcggttttgcaaaatggatgaaggagcagggagttgacttaattgactgcagctcaggcgcccttgttcacgcagacattaacgtattccctggctatcaggtcagcttcgctgagaaaatccgtgaacaggcggacatggctactggtgccgtcggcatgattacagacggttcaatggctgaagaaattctgcaaaacggacgtgccgacctcatctttatcggcagagagcttttgcgggatccattctttgcaagaactgctgcgaaacagctcaatacagagattccggcccctgttcaatacgaaagaggctggtaatgccataagagatatcctgtagaggatatctctttttttatttttagagaaacgatcggctaaggttctccgtctccctagtagaaccaattagaggagatgactccaatgaaatcagcttggatggaaaagacatatacaattgacggatgtgcgtttcatacacagcaccggaaaggatcaagcggtgtaacgattgtctttgaggccggctatggtacttcttctgagacgtggaaaccattaatggcggacattgatgatgaatttggcattttcacatatgatcgggcaggcataggaaaaagcgggcaaagcagagctaaacgaacagctgatcaacaagtgaaagaattggagagtttgcttaaagcagctgatgtaaaacctccttatttggctgtttcacactcatacggagctgtcatcaccggtttatgggcctgcaaaaacaagtatgatattatcggcatggtccttcttgacccagctttaggcgattgcgctagctttacctttatacccgaagaaatgcacagatcacatacgagaaagatgatgcttgagggcacacatgcagagttttcaaaaagtctgcaggagctcaaaaagcggcaagtccacttaggaaacatgcctcttcttgtgttgtcatcaggagaacggactgagaaattcgctgctgaacaggagtggcaaaacttgcacagcagcatattgtctctatctaaccaaagcggctggattcaagctaaaaacagctcccacaacatccatcatgatgaacctcatatcgttcacttggctatttatgacgtatggtgcgcagcgtgccagcaggccgctcctctttaccaggcagtcaattaacgtaaaaaaagaccgggccgtaagggattcccggtcttttatattattttgtttcacggtgaagggtatatttctttaaacgcggtgaatattttttcagctccaaacggtctggattggtgcgtttattttttgttgtgatgtaatttcggtctcccgtttcagtgcaggctaaagtaacatttactctcataattaacatctccttataaagcgtaatgattacgttttattatacaacgtcatcacaaattgtcaaataagagctccgccttcagcctcgcgggacgtttacctctaagaaatcatatgccgccacgctattggggaaaacgtcaaccgcttctttttgaagctccaaagaagcatctccctgatatcttgcgctgatatgggttaaaatgagctgcttcgctcttgcttctttcgctgttacagccgcttgttccgttgtactgtgataataatcataagcaagtttacggtcttccttagcaaaggttgcttcatgaacaagcacatcacaatccctcgcaagctcttttagtttgtcacttactctcgtatcaccggagaacacaacagatcttccctttttaggaggctccagaaaatcattcccattgatgattcgtccgtcttcaagcgttaccgtttcgccttttttgattttctgatatacaggtccgggcgggatgttcatttcttttaatacgtcagccttcaaggaacccggtacgtctttttcctgcacacggtacccgaaggcttccactccatgaataacagataccgctgtgacaataaactgatcgtcctcaaacacgattccttcttcaatttcctggatcgcaagcggatatgtcaaatgggttttcgtgacggcaaggcttgtttcaataaacgccttgatccctttaggtccgtacactgtcagctcgtcctctccgccttgaaaggaacggctccccagaagccctggaagtccgtatacatgatcgccgtgcatgtgtgtaataaagattttctctattttacgaggtttaatcgttgtatgtaaaatttgatgctgtgtggcttccccgcagtcaaaaagccataccgaacgcctttcttcaagcaattttaatgccaccgacgttacatttctcgccttggcggggatgccggctcccgtccctaaaaaaagtaattccacgtttccttcctcctactagaaccagatacctacaagaatacaggatcaagctcaaaatgtgaatcttgcctctgaaaagaacaatcctttcgtgctagaaacattttttcagcattctgcttaaaaaagggcttaaatgtttgctttcgttgaattttagatttaaaatgaaggaaatatacggggtgtactaaaataaagcttcgaataaagtgaggtacttttagtgaaaacaaaccaacaaccaaaagcagtaattgtcatattcggtgcaactggagatttagcaaaacgaaaattgtatccgtctattcaccgtttatatcaaaacggacaaatcggagaagagtttgcagtggtaggagttggaagaagaccttggtctaatgaggatcttcgccaaactgttaaaacatccatttcctcatctgcagataagcatatagatgatttcacgtctcatttttactatcacccgtttgacgtgacaaaccctggttcttatcaagagctaaacgtattgcttaaccagctggaagatacatatcaaattcctaacaacagaatgttctacttggcaatggctcctgaattcttcggaacgattgcaaaaacattaaaatcagagggtgtaacagctacaaccggctggtcccgccttgtcatcgaaaaaccgttcggccatgatctgccaagcgcacaggcattgaataaagaaatccgcgaagcatttacggaagatcaaatttacagaatcgaccattatctaggcaaacaaatggttcagaacattgaagtgattcgatttgccaatgcgattttcgaaccgctttggacaaaccgctacatttcaaacattcaaatcacatctagcgaatcactaggcgttgaagaccgcgcaagatattacgaaaaatcaggcgcccttcgcgacatggtgcaaaaccatattatgcagatggttgcccttcttgcaatggagccgcctatcaaattgaacacagaagaaatccgcagcgaaaaagtgaaggtgctgagagcactgcgtcctattgcaaaagacgaagtggatgaatactttgtgcgcggacaatatcaagctggtgaaattgacggtgtaccggttcctgcttatacagatgaagataatgtcgctcctgactccaatacagaaacctttgttgccggcaagctcctgatcgacaacttcagatgggctggtgttccattctacatcagaaccggaaaacgaatgaaagaaaagtccacaaaaattgtcgttcaatttaaggacattccgatgaacctgtactacggtaatgaaaacaacatgaatccgaacttgcttgtcattcatattcagcctgacgaaggcattacgctttacttaaatgctaaaaagcttggcggagcagcacacgcacagccaatcaaactcgattattgcagcaattgcaatgacgagttgaacacccctgaagcatatgaaaaactcattcacgactgtcttcttggcgatgcaacaaactttgcacactgggatgaagttgccctttcttggagctttgtcgactctatttctgaaacatgggcagcaaacaaaaccttatctcctaactacgaatcaggctcaatgggaccgaaagtatctgatgatcttttggcgaaagacggcttacactggtggaatatataataagaagaaaaaagccgaaaatgtttacaagcattttcggcttttttgcagctgtcacagaggtatagcactctcattaataacaaaacccccgaagctctatagctttgggggtttctattgattacttcatccattcagtatggaagatgccttctttgtcagtacgctcatacgtatgagcgccaaagtagtcgcgctgtgcttggattaagtttgcaggcagtacggctgtgcggtagctgtcatagtaggctaatgcgcttgagaatgatggcaccggcacaccttgggcaactgcaagtgaaatcacttggcgaagcgctccttgatagctttctacaatattcttgaaatagctgtcaagaagcaggttgtcaagctcaggctcgcgatcgtaagcttctttgatcttctgaaggaatgccgcgcgaatgatgcaaccaccgcggaagatcatagcgatttcaccatatttcagatcccagttgtattcttcagaagcagctttcatttgggcaaatccttgcgcgtatgaacagattttactcatgaacaacgcttttctgaccgcttcaatcagctcttctttattttctgtaacaggcttcacttctggtcctgaaagaagtccgctcgctttcacacgctcttccttcatagctgagataaagcgtgcgaatacagattcagtaataatcggaagcggaacgcctaagtcaagtgcgctttggcttgtccattttcctgttcctttttgccctgctttatcaagaatcacatcaacaagcggcttgcctgtctcttcgtctttttttgtgaagatgtcagccgtaatctcaatcaggtagctatcaagctcacctttattccattcagcgaaaacttcatgaagctcatcagcagaaaggcccagcacctgtttcagaatgaaatatgattcagagatcagctgcatatctccgtattcaattccgttgtgcaccatttttacgtaatggccggcgccgtccggaccgatatatgtcgtacaaggttctccgtcaacttttgcagaaatggcttcaagaatcggttttacaagctcatgtgcttctttttgtccgccaggcatgatagaaggtcctttaagtgccccttcttctccgccggaaacgcctgttccgataaaatgaatgccgctttcagcgagttctttgttacggcgctgtgtatctttatagtatgtattaccgccgtcaattaaaatatcatccttctctagatgaggaagaagagattgaattgtcgcatctgttgcagttcccgctttaaccattaataagattttgcgcggtgtttccaaggattggacaaattcttcaatgctgtatgtgccaacaacattttttccttttgcctcctgtaaaaactcctcagttttactgcttgatctgttgtaaacagaaacagaaaatccccggctttcgatatttaaagccagatttttacccatgaccgcaagtccgataacgccgatttgttgttttgacatattctaacgtcccttctgcaaacgtttaatcattttaaaatttaaattaaaataaaatgatatttataataaagaaattaccatacattcaccctttttttcaagcgattcagcttttcttttcatcatgaaaaaaatctttattaaagcttgttccctttgttttgctctcctctttttttaacgttgccccttttctgatcagtttggtaccgtactttttattcagcttttccatcatctgctgaataggctcatccttcgcatcttcattaaagctgaacaaatcgagctgtttataggcctgctctttttctactaaatccgttccggtaatgccaagcagcctgacaggatttttattccagtgtttaaaaaagaggtgctccgcttctttcaaaatgtcatttttttgatcaatcgggtttctcagcgtggtgcttcttgtgatggttttccaatccgcatatctaatcataataaaaagcttcgaagccatgacttccttgcgctgtaaacgggcactcacagaagcagcaagctttctaaagacgcctaacagctcttcttcatcactggaatcatgggaaagtgtcgatgagttgccgacgcttttaaattcgtaaatgcgctccgggtcaaccggcgcatggtgaatgccatttgctttatttttaaggcgcggaccgtttatgccaagcaggcgtttcagggagtgttcatcagctgcagctagctctccgattgtatggatgccgagtcccttcagtttttccgctgtctttttgccgactccgtgcatctctccaacaggaagcggccacaggatatcaggcacttgcctctttcttaaaatcgtaattccaagcggttttttcatatcagacgccatcttagcgagaaatttattcggtgcgatccctatgcttgacgggagcagcagctctttttgcagcctgctttggatttcttttgccgtctctagcgcgcggctgctgtatggtgtatcggtcatgtccatatagccttcgtcgatggagacaggctccaccaggtcagtatattcacgaagaatggtaaacatcgctcgtgaagagtttctatagcggtcaaagttcggcggaagaacgatgagctcagggcaatggcgcttcgcttgccaaaccggcatcgttgttttgacgccgcgcgctcttgcttcgtagctgcatgttaccacaatgccctttcgctcctttacgtttccggcaactgcgaccggctttccccggagagccggatcatatgccatttcaaccgacgcataaaagctattcatatcaatatggaaaataattcggctctttcccggcataaacaaatctccttttcggtcattagacaacagcttgtacatatagtaaaatgaagctattgaatggatgtgatgacaatgtttgtggaatcgataaatgacgttttattcttagtcgattttttcacaattattcttcctgctctgacggcaatcgggattgcattcctcttacgagagtgccgtgcgggcgagcaatggaaatcaaaacgaacagatgaacatcagacggtctttcacattaaccgaacagactttcttattattatatatcatcgcattacaacttggatacgtaaagtcttccgcatgaattcgcctgtgaacgatgaggaagacgccggttctcttcttttataaaccgcatttataaaaaggaggagaacaaaattgttaaaaacatatcaaaaacttttggctatgggtatctttttaatcgtattatgctcgggcaatgctgcatttgcagcgactaatcaggtgggaggcctcagcaacgtaggttttttccacgattatttaatcgaaccgttttccgctctgcttaagggtgttgccgggctgtttcacggagaatacggactctctattatcctcgtaaccattattgtgcgtatggttgtactgcctttgtttgttaatcagttcaaaaaacaacgcgtgttccaagagaaaatggccgttattaaacctcaggttgacagcattcaggccaaattgaaaaaaacgaaggaccctgaaaaacaaaaagagctgcaaatggaaatgatgaagctgtatcaagagaacaacatcaatccgcttgctatgggatgcctcccaatgctgattcagtttcctattgtgattgggttttattacgcgattcgctctacacctgaaattgcgtcacactcgtttttatggttcagtttaggacaatctgacattctcgtgtctcttagcgcgggagcaatgtactttatccaggcctatgtcgctcaaaaactgagcgcgaaatattccgctgtcccgcaaaaccctgcggcacagcaatccgcaaaattgatggtgttcatcttccctgtgatgatgacgattttctcgcttaatgttccggcagcccttccgctgtactggtttacaagcggactgtttttgacagtgcaaaacatcgtccttcagatgacgcatcataaaagtaaaaaaacagccgctcttactgagtcggtgaaataaaaaagcaaccccgcgcgaaaagccggggttgttttttgttacttgcaaagcataccgcgccaaacagtcttgtttatcatagctgaagcagaaatggccatccaaaaaatagccgtatcgtttaaaaagaaggaaatagggaatacctttactcacctccaaacgaaaggagcatatacgttgacggaacactttcagcaaaaaaacatttctgtacctgatggaatctggatcatgagacaaacctggaatgatgtcttatttgctcactggcctgttgatgtttctatccttcgcgctttggtaccgtccgttttagaattagatacatataacgggcaagcttggatcagcatgcttccctttatgctcacgaacctaagggcgcgttatcttcctgccattcccggtgcgcgtgcatttcctgagcttaacctccgcacctatgtcacgtataaaggcaagcccggcatttatttttttagcttagatgccgatcatcgtctggcggtccttggcgctcgcacattctttcatctgccttatttttacgcggatatgaagtccgaaaaaaacggtgatgccattgactatgtcagcaagcggaaaaatgacaaagaagcagcattccacgccgcataccggcccatttcagcgccttttacagcagaaaaggattcgctcgattactggctgacagaacggtatagactctatactaccaatcaaaacaaactctattacgaagacatccatcatcatccatggctgctgcaaaacgccgaagcggaaatttcagtcaatacggtgactgatgctcacggcattacattgccagagtcagaccccttgcttcattacgctaaaaaacaggatgtgttattttggccgcttaggaaatggagctaaaaaaacccgatgcgggaaatcgcactcgggttttctttttttattttgccgcctcttcaataatggcaacaaccatttctgccgttttaacgagctcttcgatcggcattttttcattttttgtatggatttgctcataaccgacagcaagattgaccgtcgggatgccatgaccagcgattacgttcgcgtcgcttccgccgccgctcgtttgcagctcgcttggacgtccgattttagcagccgcttttttcgcgatttcaacaacttggtcgccgtcttgatatttaaagcccggatacataacctcaatttcgacttctgcgcgtccgcccatatcagcagctgcctcttcaaaagcagctttcattttttgaacctgagcttccattttctcaggaactaaagagcgcgcttcagcaagaatatgaacttcgtcgcacacaatgtttgtttgtgtgccgccttcaaaccggccgatattagctgttgtttcttcatcgatacggcccaatggcatttttgaaatggctttgctagcgattgtaatcgctgaaatgcctttttcaggttcaaccccggcgtgagcggttttcccgaaaattgccgctcttaccttcgcctgtgtcggcgcggccacaatgatatttccgacttttccgtctgaatcaagagcatagccgtaggatgcagtgatcatagaacggtcaagcgccttcgctccgatcagacccgattcttcccctactgtgatgatgaattcaatcgtgccgcgttcaatgttttcttctttcagcaccttaatcgcctcaaacattgcagccaatcccgctttatcatcagcgcctaaaatcgtcgtgccgtcagttttgacgtaaccgttctctacaactggttttacgccgtttccgggtacaactgtgtccatatgagatgtaaaatagatcgtatctgtttgttttgtcccttttagcgtgcaaatcaggttaccggctccgtggcccgtgatatccattgtatcgtcttctttaacgtccacacctaaatcagaaaattttcgtttcagcactttgcagatttcagcttcgtgctttgtttctgagtcaatttggacaagctctaaaaattcttccagcaggcgtttttcattcaccatttgtaagtccctccatattaaagcggtatgttaccgtgcttttttttcggtctctcttctgtcttatgtgcaagcatatgaaaagcttgaatcagttttccccttgattcttccggcaaaatgatgtcatcgaccattccacaagctgccgctttgtatgggccggcgttttgctttttgtattcagctgttttttcgcgtttcgtcttttgcgggtcagctgaagctttgatttccttttcatacaaaatcgatgccgcaccttctggacccatcactgcgatttcagcattcggccatgcaaacacaaggtccgctccgatcgctttgctgttcatggccacataggcgcctccgtacgcttttctaatgatgagtgtgacttttgggacagtcgcttcagcataagcaaacaataattttgctccatgcctgatgattccattgtgctcttgctgaatacccggcagaaaccccgggacatcttcgacagtcaatagcgggatatcaaatgcgtcacaaaaacggatgaaccttgctgctttatcagcagcgtcaatcgtcaggcttcccgccagatgcttcggctggctcgccacgatgccgattgctttttcacccagccttgcaaacccaatgacaatgttcttcgcaaaaaatggctgaatctcaaaaaaagattgcgggtcagccagctccctaatcaccttccgaacatcataagcctttgtcgtatcagcagggacaagacggtttaataacggtctggacgcctctttctctggcttcggctctgttgtccggccattcagcggcaaataagacagcagttttctcacccctgtcagaacctccttctccgtatgcccggaaaagtgggcgtttccgctgacggcattatgtatccccgctccgcctaagctctccgcatcaacctgttcccctgtcactttttcaatcaccttcgggccggtaataaacatccggccggtctgttcagccataaatataaaatctgtgagtgccggagaatatacagcgcctccagcgcacggccctaaaataaccgatatttgcggaatgactccggaatataagacgtttcggtaaaatatgtgaccgtatccatctaatgataacacaccctcttgaattctcgcaccacctgagtcattcagcccgataatcggcgccttattttttgctgccagatccatcaaagcgcagattttcctggcatgggtttcgccaagcgcccctccgtacactgtgaagtcttgcgcaaatacataaactgagcggccgtcaattgtgccataccctgtcacgaccccatcccctaacatgcgctgttctcttgttaacacttgactttccatgaaggggtgtaattcgataaagctgtcctgatctagaagaaatatgatcctttcccgagcagtgtgcttgcccttttgccgctgctgagccagcttttcccgtcctccgccttcttctgcctgcttgcgtttcgtgtataaatgatccatgtgttcattcatgctcattgtgttggtctcctttcggttcacaaagctctacaagaacaccgtttgtttcccgaggggaaataaacgcgatctttttcccgttcgctccctgtcttggaaacctgtcaatcaattgaacatgctggtcagacaatgcttgaagctgttcagataggccgttgcacaaaaacgcaatatgatgcagtccctgccctttcttctccaaaaataaatggacggggctgtcagctgtcaacggctctatcagctcaagtttgacgctaccagcttgaaaaaaagcaacattcaccttttgctcttcaaccgtttcttgatgaagaaatgcaagccccaatacattttcataaaagcttcttgcatcttttatcgaaaaaacggctatcccgatatggtcaagcctgttcattttcatccctgctttcgctaatagatatcgcttgtccgcccattcaaaacacgctaaaatatagacagattgtttaaggagtgaaaatcatgtctcaaaaactgatgaaaagcgttttgatcgtgattttgggagtttttattctttcaactgtactctcaggaatcgtcatgtttctataacgataaaaaagcaggcgccttattcaatgggaatatcctgcttttttatcagagctttatgctcgatggcaatctcctcaaaagagcggttgtcgtccgtgatcagcactctcgttcctactggtatcgtttgaaacaaatgaacaacctcatcgttatgcatacgtatacagccgttagacacaaattttcctactgattcctctcggtttgtcccatgaattccataaatccgcccgtccgttcctttcgcgtcaaatccgatccatctggccccaagcgggttatcaggagatcccccttcaatatttttctttctgtagtaaggattttccgcttttaccgttaccgaaaactctccttcaggcgtcaaatcatctgtttttccagtcgccacactatacacgccttctactttgttgtcgagaataacagcaagttcatttgttcgcttgttgacaataacatacggatcacctggcagcggattttcgccgagcggccaaatcggtgaaatcatcattaaaatcgaacataagaaaaaacgcataagctcctcctttttcattaggttgaccaatgaaggaagagctcatgcgaatcatccgagtgatttttgcgcttttattcctttaaaataacttttaatcactaaatattgttccatttcgccgagaagatggaagagagcggccctcgcttcaaattcctctctagtcgcaggaagcggcatctcctcaaattcttttctcatgtcagcaagtcttttcagaaatttgtacgctgtattcccagggtgtatcgcctcccgcaaatcatgaataaattcagcgatcatttttccctgatctaccgtgatggagatcgatgtcactttagggagaaggcgttcgataatttcaaattgcttttctctcattttaaaataatgataatgcagattttcgtaacgcaaaatgtggttttgcacatctcgatatgccaggtttttagcctccgtaatgagctggtgcgtttccggaatttcttttcctgaccaatcttgctcaccagttaacaaataccgttcgatttctgcaaaaatgacagcaaagttatcctctatctttttgcggtaggcaatcagtttccggtcaagactaggcatatacaagttcatcaatagagcgacgccgatgccaaccgtaatcagctgaacttcattccagatgaaagcaagcgtaatgccgccggacatgtataaatgaaggataataacggaactggtgacgataccctcgttaatttttaacagaaccgttatcggaatgaatatcaaaagaagcgctccgatcacaaacgggtggtagccaataagctcaaaaaagagataagaaaaaacaattgccagacagcatgccgcaaagcgggcccatgaggcctgaagcgaccgtttttgtgtgatttgtatgcacaaaatggtgatgattcctgctgatgcgaagttttgcaaatgcaataactggcttatataaatagccaaagctgttccaagcgcggtctttattgtgcggtaaccaattttaaacatgtcggactccatttctatttgtttcttcaataaaaaagaagaggcggccagccttcttcttttttatattctataatattttctctaaaaagtcctgcgctcttttggattttggcgacataaaaaattccttcggattgccgtcttcgacaatcattccttggtccataaacagcacacggtctgccacttcttttgcgaagcccatttcatgtgtgacaatcaccatggtcatgccggtttcgaccagctctttcatcacctgtagcacttctttgaccatctctggatcaagggcggaggtcggctcgtcaaacagcatgatgtccggattcatcgcaagagccctggcaatcgcgacacgctgtttttgtccgccagacaaacggtttggatagtcatttcgcttttcaaacaaaccgactttgcggagcaggtcctcagctttctcctgtgcagcctgttttgattctttttttacattgacaggcgcgtacatgatgttttcgagaaccgttttgtgcggaaagagatgaaaatgctgaaaaaccatcccgatgttttcccggacctttaatgtgttggttttcggcttcgtaatctctgtgtcttttattgtaatggttccgccgttaggcttttccaacaggtttaaacagcgtaagaacgttgatttgcctgagcctgaaggaccgatcacggcaacaacctcaccctcagcgattgttgttgaaatgttttttaatacttcgtgtttcccaaatgattttgacagcttttcaaccttaatcattggatttcagcttcctttctacagccttgccgataaacgttaaaatcaggacaagcacataataaatcaatcccgcgataatgagcggctcaaggtaattgtaagtggcggcgccagcttgatatgcgcgtctcatgacatcaccaagcccgatgacggtgacgatcgccgattcttttgttaacgtaattaattcattcacaattgcaggtgatatatttttgaaggcctgcggcagcagcagatccttcatcatttttccatacgggacaccgagtgcaacagcagcttctttttgccctttatcaatggcattgattccggctctgataatttccgatacataagcggcggaattcaaagacaatgcgacaaccgcagcccaaaactggtcaatttgaaatccgagcagctgaggaaggccaaaatagacaatcataagctgcagcactaaaggcgtgcctcggaacactgatgtataaaaatcagcgatccagataaacgggcggaatgtgctgatcttgcataagcttagcacaataccgagtataagtccgataatagcagatacaacaacaatttttaatgtaattgccaagccttctaatataaaaggaatttgggggatcgttgctgaaaaatccaaattcatagcctttgtctccttttcttacaggaaaaaagtttcctattcaataaaaaggctcaacgaaaaagttgagccgcttttttttacttctcgccagtgaaccattttttcttcaatttctcaagctctccgttatcttccatttccttgagcgctttattgaatttgtctgtcagttcactgtcctttctgaaagcaattgctgaaccggcttcttccgctttcgcctcaggaatcacaaagccttgcaggtcatcatttgatttgaaatacccttctgcaacaatgtcttcaataatcgcggcatcgaaacggtcagatttgatttcctgcaccaaatcagaaattctgttgcggtcttctgttttaaaaccatattccggagaaagctctttccccttctcttcctgaatagagccaagctgaacgccaactgtttttcctttcaggtctttcaaagattgaatgccgctgtcttttttgctgacaatcatatggttcgctgtgtaatacacatcggaaaaatcaacttgttttttacgctcaggcgttggtgtcattcctgacagaacgagatccacctgttttgatttaagcgctgtaattaagctgttgaagtccatatcctgcacttcaatttcatagcctgccttctttgccagagcttttgccagctctacatcaaagccgacaatattatctccttctttatattcaaacggtttgtaatccgccgaagtacccataattaattttttctttccgctttctgaacctgaattgcttgagccgcacgcagttaatgcaaaggtgatgcaagcagctacaagtaataagagccattttttcatgatccatttcccccgtattcattacttttggtgtatttgaatatttattcgttaatttgtattttaaacagtttctcatttttatgcaatactatttttaaaaattatctttaagcttatctttccagtgatctcttctgatattactagataaaaattaaatcgctgtacaatccgattgaataatcccttaatatttattcatatatccttagaaatttatgcacaaaaaaacccgggctgctttgagcatccgggttgttcgtcttatacttcttcacaatattcttcaaaggcttcctgcagctttgccactacggccatcggctcatggccttcaatttcatgacgctctaccattttcatgatctttccgtctttcaaaatcgcaaaggacggagaagatggcggataaccttcaaaatagtcacgcgcacgcgctgtcgcttctttatcctgtccggcaaaaacggtgacgagctgatcaggtcttttatcatagtgaacggaatggtaggctgccggtcttgcaattcctccggcgcatccgcaaacagagtttaccatgacgagcgtcgttccttttttcgtaagtgcctcatccacctcttcggctgttttaagctcggtgtatccggcagctgttatttcttgtctcgcttggcggacaatatcattcataaataaattaaagtccatgttcaatgaagacctctcctttttcatcatctgttcttatgatagcaaggaaacgtccatatcggcaaatgactttgcttcgccgtgcactttttttgctcttcgtttactgcttacagaaaaaggggattatataactagaagtaaaataaaggagcagttgtatatgagccacaggaaagcgttactgattcataacggaaatgccggcaacaaaaatatagaaaaagcacttggtgctgtggtgccggttttatctcaccatttagatgaggtaattattaaacagacaaagaaaaaggatgatgcgtatcatttttgccgatccattgatgattctgtcgacaccgtcttcattctcggcggcgacggcacgatccatcaatgcataaatgctatcagcgctctagaaagaaaacccgcggtcggaattttgcccggcggcacgtgcaacgacttttcaagagtgcttggcatccctcaaaatcttgcaaaggctgcggaagcacttatgtcaggaaaaaaaaccagcgtagacgtatgtcagatgaatgaccgttattttttgaatttctgggggatcggcttaattgcagaaacgtcgaatcaaatcaacgaaacggaaaaagcattattgggaaaaatcagctattttacaagtgccttgcgaaccgtctcatccgctgcatcgtttccgatgacattaaaaattgatggagaagaaattaaagaagaagccgttatgctgcttgtgatgaatggccaatatattggaacgaatcgaattcctctccccgatgccagtattgaagatggcttacttgatgttctcatatgccgcaataccaacctcaccgcgttgcgggagctgatgagcatggaacagggttcaattgatcgttttaccggagagttgtcctatgtccaggcttcccgtatcgagattgaaacagacactgccaaaaaggcggatatggatggagaagtttatacacatacacccgcagtcattcaggtcctgccgcagcatatcgacatgcttgttcccgcaaatgaataactgtcatagggctttagaaagattttgcaaatccgttgactctcccctaggaggaggtcttacagtataagggatacacacttgaaaaaggggaagtcatatggagaagaaaaatattaccttaactatattattaaccaatttatttattgcttttttggggatcgggcttgtgattccagtaacgccgaccattatgaatgaattgcatttatcggggaccgcggtcggctatatggttgcctgcttcgctattacacagctcattgtctcaccaatagccggacgatgggttgatcgcttcgggcgcaagatcatgatcataatcggcctgttgttctttagtgtgtcggagtttttgttcggcattggaaaaacagttgagatgttatttatctcccgtatgctgggcggtatcagcgcagccttcattatgcccggggtcacggcttttattgcagatatcacgaccattaaaacacggccaaaagcgctcggttatatgtcagccgctatttcaacaggatttattatcggccccggcatcgggggatttttagcagaagtccattcccggctgccttttttctttgcggcagcttttgcactgttagcagccattttatcaatcctcacgctgcgcgagccggaacgaaaccctgaaaatcaggaaataaaaggacagaagacaggctttaaacgaatttttgcccccatgtatttcatagcttttctcattatcttaatttcgtcttttggtttagcatcatttgaatctttatttgcattattcgtggatcataaattcggatttacggccagcgacattgccattatgattacaggaggagcgattgttggcgccattacgcaagtcgtcttattcgaccgcttcacaagatggtttggcgaaatccatttaattcggtacagcttaattctctctacgagtctggtattcttgctgacaacagtacattcatatgttgcgattctgttggtgacagtcaccgtatttgtcggatttgatctcatgcggcctgcggtaacgacttacctgtcaaagattgcgggaaatgaacaggggtttgccggcggtatgaattcaatgtttacaagtatcggcaatgtattcgggcctattatcggcggaatgctgttcgatattgatgtaaactatcccttctactttgcaacggtcaccttagccatagggattgcactgaccattgcttggaaagcgcctgcacatcttaaagccagcacgtgataagaagcgcattctttgtgtactgcaaagatgcgcttcttctttatactgatgatagaaggagtgatggcatgaaggaatcgtattactcaattggggaagtatcaaaactggcaaacgtgtcgataaaagcgctccgttattacgataaaattgatttatttaaacccgcctacgtcgacccggataccagctaccgctattatacagattctcagctcattcatctggatttgatcaaatcattgaaatatatcggcacacctttagaagagatgaaaaaagcacaggacttagagatggaagaactgtttgctttttataccgagcaggagaggcaaatcagggagaaattagactttttatcagcactggagcagaccatttcattggtgaaaaagcggatgaaacggcagatggaatatcccgcgctcggtgaggtgtttgttttagatgaagaagaaatacggatcattcagacagaggcagaaggaatcgggcctgaaaacgtgctcaacgcctcctacagcaaattaaaaaaatttatcgagtcagcagatggatttacgaacaatagctacggcgctactttctcttttcagccctacaccagcattgatgaaatgacttaccgtcatattttcacgcctgtattgacgaataaacagatttcatcaattacgtcggatatggaaatcacaacaatccctaaagggaggtatgcgtgtatcgcgtataatttttcgcctgaacattattttctcaacttacagaagcttatcaaatatatcgcggaccgccaattaacagttgtcagtgatgtatacgagttaatcataccgattcattactccccgaaaaaacaagaagaatatcgagtcgaaatgaaaatacggatcgctgaataataaagcatagaaaaagagcattttttgaaacaaaacttcaaaaaatgctctttttgcttatttagtaaacagatgtcttctcgtcaatcgattctaaaatttgtttcactcgtccgaggaatcgtccgcacacgagaccgtcaagcactctgtgatctaatgacaggcacagattaaccatgtctctgacagcaatcatgccattgtccatgacaaccgggcgtttgacgatggattctacttgaagaatcgcagcctgagggtagttgataatgcccattgactgaacagagccgaacgaacctgtgttgttgacggtaaacgtgcctccctgcatgtcatctgcagtgagttttccgtctcttacttttttagctaggccggtaatgtctttcgcaatgcctttaattgttttttcatcagcgtttttaatcaccggaacaaataaagaatcctctgtggcaactgcaattgaaatattgatatcctttttctgaataattttgtcccccgcccacatgctattcatttgcgggaattcttttaacgcctgagcgaccgcttttacaaaaaaggcgaagaacgttaaattaaagccttctgtcttcttaaaggaatcttttatactgttgcgatatgcaaccatatttgtgacgtcgacttccatcatcgtccaagcatgcggaatttctgttttgcttcgcttcatattggaagcaattgcttttcttacacctgtgacagggatttctttatcaccggctgcagacgcaggatatgacgtctcttcttttggctcaggttttgatgcagacttcggtgcaggagctgctgttttcggctcctcaggattctgttcttgcacgccgcctgtttcaattaagcgctgaatatcttttcgtgtgatgcgcccgccggcacctgttcctgttacttgttcaagatcaatgctgtgctctccggccaaacggagtacagctggcgagtagcgctttttattgggctgatcagctgcttcggtactttttgcagcaggcgtctcagcggcttttgaagcagctggctgttcttgtttttgttcagccggattcgcgccttctgtttcaattttgcaaatcacttctccgacttgcagggtttggccttcttctcccacaagctctgttatcgtaccagtaaaagaagacggaacctctgcatttaccttatctgtcatgacttccgcgatcggatcgtatttgttcactttatcaccgggggcgacaagccatttgctgatcgtcccctctgttacgctttctccaagctgcggcatcgtcatttgttcaattgccatgattgtatcctcccttacgtctttaaaactccgctaattctctcatcgccgcttccactttatcagggttgaccataaagtatttttccattgtcggcgcataaggcatagccggaatatcaggacctgcaagccgtttgatcggcgcgtctaagtcgaacagacaatgctcggatataattgcggctacttcgctcatgatgctgccttcttttgtatcttctgtgaccaaaagaacctttccagttttggacgcagcttcgataatcgcttctttatcaagcgggtaaactgttcttaaatccaccacatgcgctgaaatgccatctttttcgagacgttctgcagcttgtaaggcaaagtggacacacagaccgtatgtgatcactgtgatgtcgtcgccttcccgttttacgtcagccttgccgattggcaggacataatcatcagccggaacctctccctttatcagacggtacgcccgcttgtgctcaaaaaacagcacggggtcttcgtcacgaactgcggcttttaagagccctttcgcgtcatatggtgttgatggcatgacaattttcagtccgggctggttggcgaaaattgcttcgactgattgagaatgatacaaggctccgtgcacgcctccgccgtatggcgctctgacgacaatcggacaactccagtcattgttgctgcggtagcgaattttagctgcttcagaaataatttggttgactgccggcataatgaaatcagcaaactgcatttcagcaatcggtctcattccgtacattgccgctccgataccgactcctgcgatcgcagattcagcaagcggcgtatccatcacgcgctcttccccaaattgttcatagagtccggctgtcgctttaaacacaccgccttttcttcctacatcttccccaaggacgaagacgcgagaatctcgttccatttcttctttcatcgccaaattgattgcatcaatatatgacattactgacatttgttcttcctccctacttcgcatacacataatcaagcgctgactcaggagctgcataaggggcgttctccgcttcatccgtcgcttcatttacgattgccataatttcatccagcatggtttgttctatctcatcggacagcaggcctgtttcctttaagtaagcttgataagtaagcaggggatcactttttttcgcttcctctacttcttcacgccctctgtagctgctgtcatcgtcatcactggaatgtggtgtaaggcggtaagaaatcgtttcaattaatgtcgggccttctcctctgcgtgccctttcgcgtgcttctttaaccgcttgataaacttccagcgggtcatttccattcacagttacgccaggcatcccatagcctatggcacggtcggaaatgttctcacatgcgacttgcttatcgtaaggcactgagattgcgtatttgttgttttcacacataaaaataaccggcagcttatggacagcggcaaagtttgccccttcatggaaatcgccttggtttgaagacccttccccgaatgtaacaaaggctgcgatatcctttttctccatacgtcccgcaagcgcaataccgactgcgtgcggcacttgcgttgtaaccggagatgatcccgtcacaatgcggtttttcttttgtccgaaatgtcctggcatctggcggcctcctgagttcggatctgctgcttttgcaaacccggacatcattaagtcctttgctgtcatgccaaacgcgagcacgacacccatgtctctgtagtacggcaatacataatccatttcacggtcaagtgcgaaagccgctcctacctgtgctgcttcctgtccttgacaagagattacaaatggaattttgccagaacggtttaacagccacattctttcatcgatttttcttgctaacagcatggttctatacatatcaacggcttcctgatcagtcagccctagtgcttgatgtcggtttatactcattcaagcccctcctttatgcttttaaaaatgaatggctttgccatctgcggcaagcgctgcttctccaattgcttcagaaagcgttggatgcgggtgaatcgtttgcccgacctcccacggcgttgcgtccagcactttggcaagacccgcttcagaaatcatgtcggtgacatgcgggccgatcatatgaacgccgagaatatcatctgtatctcggtccgccacgattttgacaaaaccgtcgctttcaccgtatacaagcgcttttccaatcgccataaatgggaacttgccgattttgacattatgcccgttcgcctttgcttcgtcttctgttaagccgacactggcagcttcagggcttgagtaaatgcacttcggcacaagcgtcggatcaagcggatgcggattgagacctgcaaaatgctcaacagcaataattccctcatgtgaagcaacgtgagctaactgcaggccaccgattacgtctccgattgcataaatatgagattccttcgtttggcagctttcattgactgaaatcatgccattttcagtaacaatatcggtgttctctaggccgatgccttcgatatttgcctgtctgccgatggaaacaagcattttctcagcagagtaggtaacggtttctccgtctttttccgcttgtatgctgatatcgtctgatgtttttgtcattgtgtcaggcagcacttttgcccctgttatgaactggatgccttttttcttaagaagactttccatttcttttgaaatctctagatcttcagtcggcaatatgcgatccgcgtattcaataaccgttaccttcacaccaaaatcatgaagcatagacgcccattcgataccgataacccctccgccgacaatgatgattgattgtggcagctcctccatttggagcgcctcatctgaagtcagtacagacttaccgtccgcttcaagacccggaagcattctcggtcttgatcctgttgcaatgatcacttgtttcgggatcagcatgtcattttcttcgccatttccccgctcaacagaaattgttcccggcagcggagagaagattgacggtccaagaatacgtccatatccggtgtacacgtcaatttttccttttttcattaaatgatttacacccgctgcaagcttatcaacaacggcttgcttacgctgctgcactttttcaaagttgagggacacgccagccgtttccaccccgaattgatcggcttcacgagctgtccggtatacctctgcgcttctaagcagcgctttactcgggatacagcctttatgcagacatgttcctccgagtttttccttttccacaacggctgtttttaagccgagctgagcggctctgatggccgcaacataaccgccggtaccgccgcccagaatgactacgtcatactcagttgccatggtgactcactcctgtctgtctattcaatacgatattgtttggattgctcttcgccctgcaatactctgagcgccccttgggcaagagactgcagttcattttcacccggatagactaaaacgtctgaaatccaatctatgtatgatctgatagcagaaacaaagcttttgccgtacgcaaggcctcccgtcagcacaatcgcttcaacttctccttttaacgctgcgctggctgccccgatttcctttgctacctgatatgccatggcatcataaatgaagcgggctttttcatcgcccccttgaatcatctgttccacttttactgcatcatttgtaccgagatagcctaaaagtccgccggtgccaacaagctttttcatgatttcttcttttgtatattcccctgaaaaacatagatcaacaagatctcccgcaggcactgttcctgctcgttcaggactgaatggtccctcgccgtgcaggccgttattgacatctaccactcgcccgcggtcatggacgccaattgtaatacctccgcccatatgggtaataatcattttcatgttctcatatcgtttgccaagagaggctgccgctttacgagcgacagctttttggtttaacgcatggaaaatgcttttccgttcaatttcaggcatgcctgaaactttcgcaagcactgacatttcgtctacgacaacagggtcgacgatatacgaagggatattcaggccgtcagcgatttcccgcgcgataatgccgccgagattagaagcatgctgaccggcgtaaccgcttttcaagtcctcaatcatgtcatcattcactacgtaggtcccgccttcaattggccggagaaggccgcctcttgcgcagactgcatcaaacttcgagatattgattccctgttcatgaagcgtttcgagaatatggtttttacgaaattcatactgatcaataattcggtcaaatcgctgcagctcttctatgttgtgtctcaatgttttttcaaaaatgcttctttcattatgaaaaacaccgattttcgttgaagttgagcctggattaattgtgagaatgcgtttttcgtcatgtagcactttcataacctccagatcaatttcttaacgtctgcttaatacactgtggccgttttgcaaaaactggcttcttgagcggcgcatgcgttcaatccgttcctctgccaagcggtcagccgctaaatatgcaggaatgccgtcacgctgagaaatctcaagtacacgctcgatattgccgtaaatgccttcaacttttttcaatgcacgttctgcattatagccgtaaagctcatctgccacgttgatgacaccgcccgcgttaatcacgtaatccggtgcataaacgatgcccatttcgtgaatttgatcaccatggcgtgtctcttttaattggttgttagccgcacctgcgatcactttcgccttcagctgtttaatggtgtcgtcgttaatagtcgcaccaagggcacatggcgcataaatatcgcagtcttgtgaataaatatcatcaggatctaccgcccgggcgccaaaatcttcaactgcacgctgtacagattgtttgttgatatccgtaacgattaagtttgctccttcttcatgcaggtggcggcaaaggttataggctacgttcccaacaccctgtacagcaatggtttttccttcaagagagtcggttccgaaagcagctttagctgctgccttcattcctctgtacaccccgtacgctgtgactggggacggatttccagaagagccgaaagcaggagaaatccctgtaacgtagtctgtttcatcatgaatgatatccatatcctcgaccgttgtacccacatcttcagccgtgatgtatctgccattcagcccttgaatatagcggccaaacgcgcggaacatttcttcatttttgtctttgcgcggatcgccgataatgactgtttttccgccgccaaggtttaagcctgccgccgcgttcttataggtcatgcctctagccaatctgagcgcatcttcaattgccgcttcttcattttcatatgtccacattctcgttccgccaagcgccggaccaagcgttgtatcatgaatcgcgataatcgcttttaatccagattgttcatcctggcagaataccaattgttcgtaatcgtatttctccatatatttaaaaagttccatgttcgttcctcctaatgtgtgtattcttcagatgcgcatattgccagcgcaatggaatacagtttattttcagcagagtccgctctgcttgttaaagcaatcggtgcttttgctcctgtaatgacagccgccacgctggccttggcaaaataaatcagtgatttatataaaatattgccggcctcaattgttgggacgagaaggatatctgcgttgcccgctacgtctcccgaaatttttttctgagccgcggcaatttgtgaaactgcgttatccaaagcaagcggtccatcaacaatgcagcctttgatctggccccttttgtacatttgagctagagcagctgcattcacggttgcttccatttttgggttcaccgtttcgaccgctgcaagagcagctgcttttggcatattgttccccactgcatgggccacatgaacggcattttgcaaaatctgccgaagctcttccagcgaaggagcaatattcattgccgaatctgtcacaaacatcagccggtcaaaatccggtatatcgaatacagccacgtgagaaaggacacttgctgaccgaagcccctcctgtctgttcaataccgctttaagcaaaacagaagtcggcacattgcctttcattaaaacgtccgctgttttatgatgcacagcacgaaccgctaatttcgccgattcctcaggagtatcggcatggacgatttccacttgatgcccttgcatggatgatgtcagctcgttcagttttgtgctgtcgcccgttaacaagaaacgggcagataggtgctcggctgccagctttacagcccggatcacttcctcatcctcagcatgagcaaccgcaatggtcttatttttgtgtatcgacgctttgccgattaaatctttcagcttcatctgttaccacctttcttgtttcgactccgccttttattatgcaagttccatgccagctcttaagggtgctgtcataccaggtatattgaaacattcgtgcagatgtttgcgtttattctgcaaattattgcatgccttcatttgcaaggccatatttatccattttgtaatataagttccgaatgctgacaccgagagcttttgctgtttttgtccggttaaaatgatgcttttcgagcgtttgctggatcaaatgtgcttcaaatttttctactgcgacagacagcttttcgccttcaatatccggaaaatcaaaacctgttccctgatctgtgtcattttctttttgctcaagttcgaatacaggcaagtgatctttttcaatccattccatatgcggattcagaaaaatcatggctcgtccaaggacattttcaagctcccggacattcccaggccaatggtaggcagataaggcgcgcaaggcttgttgtgagagcccttttacattcctgccgtaatcccggttgatcttttggataagtctgacgctcaatgcttcaatgtcctccaaccgctgccgcaaaggcgggatggagatcggatagcgattgatccggtaatacaggtcttcccggaatgttccgtccgccatcgccttttcaatatttacatttgtcgccgcaatcactctgacgttgacagggatcgctttcgtgccgcccactctgacgatttccttttcttgaaggacgcgtagcaatttggcctgcatattttgtgtcagctcaccgatttcatctaagaaaatactgccgttatttgcttcctcaaataaaccctttttaccgccgcgtttcgctcctgaaaatgcaccatcctcatagccgaacaattctgattcgagcaggttttcagaaagggctgcacaattcacgcgaataaatttattgtatttccggtcactttcgttatggatggcatgggcgaacagttcttttcctgttcctgattccccgcgcagcaagatggttgccggtgttttcgcaccgagcttcgcctgctcaagcgcaaccagcatttgctcgcttttgccaataatgtcgtcaaacgtgtatttcgcttcaagcgtgcgaataatttgtctggcgcgattaagctccgctgtcagcattttaatttcggaaacatcgtgaatcacgccgacgctgcctttcaaaatcccgtccacaatcaccggtgctacattaacgatgacctctttttcattcgggccgaccttcattctgacaccgcggacaggacgtcttgtttcaagcacctttaaatgcatgctttcgccttcggaaatatcagtgtttgcaggcttgccgatgacttctttttcagaaagccccgtcattttcgtatacgctttattgattagcaggccgatgccgttttcatcaacgacagaaatcgcctcatcggaggattgaataatcgcctccagcatcgtacggacctgctttaagttggtcacttcctctgccagctcgaccgcatcagtgatatctttaaacacacaaagagcaccgagcagacgtccgccttcatcaataatcggcagtcttgtggtcacaatttgcaaatgatcgcctaacagctgcttctggttgtattcaggcactcttgtttttaaaatccgcggcatcttcgtgctcggaatcacttcttttattgggcgcccaatgacttcctcacgtttttttccgaccattttttcggccatatggttaaagagaatgatttcttcattgatatcaataaaaatcattccatcatgggtggaattaaaaattctgtcatatttataggtttgctcttttagcatttgaatcaggtgctgcttttcttccatcagctgaaaaacgatgtatgccatttttcccggcatgacaatggtatcttcatgctttctttgaaggagctcgtcaaacacggcttgatcgccggtggtatgaatgacgatatccggtttttgttgtatgtaaggtttccaatcagatgatacggcaatcccatacttttctgcttctttcaatcccggcgcctcggggtctttgtcaactacggcaatgatatctatgatggctgttttaatcagaatatgtaataacgccgttccccttttgccggcacctactatcagtaccttttgcatcccgatacccctttgtatgaaaaaatttgcacacctatttattccgttgcaataatttgcacaaccctatgttaccacgttttcttctcttgacaaaatattttttccgctggacaataaaggaaatgaaaagataaaggggttttctgaagatgagccgacttcttgcgcttttaatattagtcatccccggggctatttctgctttaggcattaaactgatgagagatacacttttcggccatacaatcaagccattttcagctctttggctccaagggttgtcaggattcatcttttttgcgatcggcctctatgtgctggccgggttcattttatacagagacagaaaacgcaatcaagtcagctcgcgattcagaaaacgatagctgaaaaaaagccggagaatgctccggctttttttgttgcattattcgtcaggcaaaacggtcttggcaatcgttttgtctaacgcttcatagtcataataagaaatcgtatcgtacagttcttttcgtgtctgcatatcatgaagtccttctttttgtgagccgtgctccttcatcaaaccaaacatccgctcacaagcttttgccgccgctcgaagcgaggtgacaggatatatcaccatgtgaaaccccatatcttcgaattcatcggcacgataatatggcgttttcccaaattcagtcatattcgcaaggagcggaacggggatacgctcagcaaactggcggaattcattctccgcctgtagcgcttccgggaaaattgcgtccgctcccgcctcaatgtaagcctctgaacgttttattgcggcatcaagcccttcctgcgccctggcatcagtacgggcaacaacaataagggagggtgccgcttgtttaatggcttttattttttgcgccatttcctttatcggaactagctgtttgccatttaaatgtccgcatttttttgggagctgctggtcttctatttgaacggctgctacccttgcttcaagcatctcccgggctgttcgggcggcatttaagacaccgccaaatcccgtatcgatatccacaagcagaggcagatcagctgcacgtacaagatctttggcccgttcagctatctctgccgatgtgatgatccctaaatcaggcagccccctgctggctgtataggcagcaccggacaaataaatagcagaaaaaccggcttctttcgcaagcaaagcggccatcccgtcatgggcgccgggaatttgaagaatgtccggtgctgacatcagcttgcggaaacgcccggcaagctcctcttgtgacgattgcttattgacgatccacgacatgaaacaaatcccccttttacatgcagaacatgtctacgaattcatttacgcgcatcgtttgtaatgtctcatagctggtacagcgctcataaatgtgtttgtgctgtttatcaggaaaatgggttttgagattgtcagaaaacttttccagcagtttcggcactgcttcctctcttcgaaaacgatggccgaggggaaactcacattccaccatttccgtgctcgttccgtctttaaaatgaacctgaacggcatttgagatggaacgtttatcaggttttaaataatcctcggtatatgttttattttcagtcacttccattttatcacgaagtttatctattctcggatcactcgctgtttcagcttcataatgctgtgcggtgatatcaccaaaaagcaaaccgattgctgtaatgtattggagacagtgatcacggtctgccggattgtggagcgggccttttttatcaatgatacggatagcggattcatgcgttctgatgacaactcggtcaatctcgtcaatccggttctttacctgcgggtgaagaatgacggcgcactccgccgctgtctgggcgtgaaattccgcaggataagacactttaaataacacattttccatgacataagcgtcaagcggacgggcaagcttgatctctttcttattgaataaaacgtcttggaacccccaacccggtgcactcagggctgtcggataacccatttccccttttaacgacatcagcgccaaatgaacacctctgctcgttgcatctcctgccgcccatgatttacgcgagcctgtattcggtgaatggcggtatgtcctcaatgctgcattgtcaatccatgcattcgaaagcgcatttttgatttcttctcttccgccgcccaaaagctttgccgcaacagcggttgtcgcaactttgacaaacagcacatggtcaaggccaactcgatttaagctgttttctaacgccagcacaccttggatctcgtgtgctttgatcatcatctcaagtacgtcgcgtactgttaacggctcttttccttcagacagcctcactcttgatacataatcagcagcggcaaggattcctcccaagttatcggatggatgcccccactccgccgccagccacgtatcgttgtaatcgagccagcgaatcatgcagccgatattaaacgctgccctcacaggatcgagaacatatgacgttcccggcactttgcttccattcggcacagtcgttcctggaacaatcgggccaagcagctttgtgcattccggataccgtagcgccaagatcccgcagcccagggtatccagcaatacatgccccgctgttgtatacgcttcggcactagtaatctctttctcaagcacatagtctgtgatttcttcgataacacgatccgttttcggcattctaccagttcctttcatggttttgtttgatatcgcgggcccatgtaactgacgcggggacggaagagccgattattggcatgctgttcgatcacatgggcgcataaaccggacgttctcgcgctgaaaaagatcggcgtatataaaggaatcggtatgccgagcatccaatacactggggcagcatagtaatccaaattcgggtaaagccctttttccttctccatcagccgctcacccgcttcgcacatctcatataaacgatggtcaccggctttatcgcataattgctgcagcgcctctttcatcatgagtgctctcgggtccatttttttcatatacacccggtggccgaagcccatgattttttcttttcttttcagttttgtttgcaaaagctgctcaaaatcagatgtcgtttttgcctccaaaagcaaatacatcacagcttcgtttgctcctccgtgaagattccctttcagggaagcgacagccccagtcaaagccccataaagatctgaatgtgtagatgcaatgaccctggccgcaaaggttgaattcggcatctcatgctcactgtacaggacgagcgaccggtcaaaaatctgttcttccaatgaagacggcaatttccctgtcatcatgtagagaaaattcgcactgtaggatagggtttgaagcggaagaatcggttctttcttattaatgatcctgtagctggcagcagtgagggcaggcattttcccaagaagctgataggcgcgttctttgtttgcggaaggagaccgatcatcaatttgccgatcatagccagcaagtgccgacaggccggtacgcagactatccattggatgagtgtcctcagggagcagctcaagcagacggagatgatcagcaggcaggcttgaggcactgattattttacgttccagcgtctccatttcactttcttctggcagcctgccctccagcaataaatggacaagctccagatagctttttgtttcagaaagctctattaaatcatagcctcttatcaaaatctggctggactgcgtgtcaagataagaaatatgagtttctgccgcaatcacaccgtccaaccctggagaatattgctgtttctcctccatatcctcaacctccgtttttgcgttttttgtctatcaggttccgccaagcaaatacttggaaataatcagtctttgaatctcgttcgtcccttcataaatttgcgtcacctttgcatcgcgaagcaggcgctcaactggataatccttcatatagccatatcccccataaatttgaacggcgtctaacgccgcctttacggctgcatcggaagcaaattgtttagccatagacgcttcttttccacagtttaggccgcggttatgaaggtctgcagcgtggtagacaagatgtcttgccgcctcagctctagtcgccatatcagccagcttaaatgaaatggcttgattggctgcgatcggccttccaaattgcactcgctgcttcgcataatcaacggcatgctcaagagccgcctctgcaattccgagggcctgtgccgcaatgccgatccggccgacatttaaattcgccatggcaatgtgaaagccatccccctctttgccaagcaaattggcttcaggcacttctgcattatcaaaaatcagttccgtagtattggagccataaagccccagctttctttctttttttccaacggtaaaaccgggtgtgtttttttcaacaataaaagccgaaatcccgtgcctgccttgatctggagctgttaaagcaaatgtgatatagatatcagctgctccgccattcgttatgaatattttcgatccgtttaatagatatttgccgttctttttgattgctgttgtgcggaggctcccggcatccgaccccgagtgaggctccgttagtgcaaatgcgcccaaatggtctcctgacgcgagctttggtatatatttcatcttctgttcttcgttgccgaagtacagaatcggattcgtgccgactgaggtatgaacggagagaatcacgccgacagccgcgctgattctagaaatctcatgaatcgccaaaatataagaaacaacgtctgccccgacaccgccgtactgttccggcaccggtattcccatcaggccgtgttcgcccatttttttgatcagctgaaagggaaattcgtccgttttctccatgatttccgcagcgggagcaatttcttttcgtgcaaaatcacgcaccatttttcgcatcatgacttgctcttgggttacatgcaactcggccacccccggatggaatagacttcaggaagtcctctcctcatagtcataaaaaccgcgtccgctctttttgccaagccagcctgctttgacatacttgcggagcagcgggcatggacggtatttggaatcgccaaggcctgagtgaaggacttccataattgataaacacgtatccagtccgataaaatccgctaatgcaagcggacccatcggatgattcatgcccagcttcatcacttcatctattgcctccggcttcgccactccctcatacacgcaatagatggcttcattaatcattggaagaagcacacggttggaaacaaacccaggaaaatcattgacttctaccgctgttttccccatcttttccgctaatgccataacatctaaggccgtttcttctgatgtagccaagcctcgaatcacttctaccagcttcattacagggacgggattcataaaatgcatgccaataacccgttgaggccggtttgttacagcagcgatttctgtaataggcaaggaagatgtattgctggccaaaatcgtatgaggcgggcaaatgcgatcaagtgttttaaacatctcagtttttgccgccatgttttctgcgatagcctcaatcacaatgtccgcatgctctgcctcctcaagcgtttgagaaatcgaaatgcggttgattacgctcttcacttccgtctcggtcctttttcctttctcagcatcacgggccagctgtttcttcagccgtttcaatcctgcctccgcggcctctggattcacatcatacatccgcacataaaagcccgcgccggcagctgtttgagcaattccgcttcccatctgacctgcgccagctaccatgatttgtttgatttccattcaaatcccctttttcatcatgttttaatgaacctgcactaagacggcgtctccctgtgctgccccgctgcaaatagcggcaacgcccagaccccctccccggcgctttaattcataaacaagcgtcatgagaattctcgccccgctcgcgccgatcgggtggccgagcgcgatcgcaccgccattcacatttactttttcaagatcgaaacctacgattttttcacatgtcaaaacaactgaagcaaaagcttcatttacttcaaacaagtcaatatcttggacagttaaaccattctttttcaggagcttgttaatagcaaaccccggcgctgccgccagctcgtgcgctggcattcccgtagttgaaaaaccaagaattgtagccagaggccgtttgccaagctcagcagctttttcctcagacatcagcacgaacgcgccggctccgtcattgactccaggagcattgccggctgtgatagaaccgtcacttgcataaatcggagcaagttttgcgagctgatccagacttgtgtcacggcgaatcgcttcatctttatcaacaacgtttggttttccttttcgaccgatccagttgacgggaacaatttcatcctgaaacttcccttcatcggcggccttagctgcccttgcatgacttctcaacgcccattcgtcctgctctcttcgtgagattgcatattccttggcagctgtatttccgtgaacagccatgtgcacctcgtcaaatgcgcacgttaatccgtcatacaccattaagtccctaagctcgccgtcccccatccgtgctccccagcgcccggcgggaacggcatacggaatattgctcatgctttccatcccccccgcaacaagtatgtccgcatcctgcgcccgaatcatttgatcacataaagtgacagcgcgaaggccggaagcacagactttattcagtgtttctgacggcacactccaaggcattcccgccagacgggcagcttgacgggaaggtatctgccctgagccggcctggacaaccatgcccatgacgtttccttctacatcatctccagagactccagcccgttgcagcgcctccttcatcacaatgcccccaagctcagcagctttcacctctttcaatactccgccgaatttgccaaatggcgttcttgcagcacttacaatgactgttttcctcatggtttcacctcattcagaagatagacagcgcttacaatttctagttgtcttctatgaatgtatgctttgaaacgggcatgaatgaatgaaaaaagaaggctgcgtcaaacagcctccttctaacaactattcatttttcagcaatgccgaagccttttctggaaagtcggtaaacatgccgtctgctcccgcttcaatgagacgcttcatatcttccggacgattgactgtatacggccttaccttaatcaaaccgttcctcattttcttcagtacttcatctgtgacccctgggctgtttaacttcgggtgatagccggaagccggaatagacgcgatatatcgatctgcctgataaagcacatctgaagttaatactgcccgttcgatatgcggtgcaagccgggcgcacagcgccaagctgtcatgattaaacgtggataggatgactctgtcctctacattaaatcgcttcactgcctccagcactttttcttccattccctcatagcggatcacgctgttttttaattcaatgttgatgagaaaatccttttttaccgcccacgagagcacatcttctagcagcggcacttttatatcgctgtacgcttgatcgtgaccagcggccgcatttgcagtctttacctcatcataggctgtatccttcacgaatcctttaagtgatgtcgtgcgattaagtctttcatcatgaattacaacaatgcgtccgtctttcgtcagctgtacatcaagctctatcccatccgctccggcttcaattcctttttcaaatgcaagcattgtattttcgggaaattgacctgatgccccccgatgggcaaaaatctttgtcatcgtttcacctcaaaccctaaagttttctccattatacttattttgtcggctccactctaggattaaggctgtatcaatctactgatcataataagaatcaatgccgttgacaatcgcatctgcggccttttgctggtattcttcacttcccagcttgtccgcgtcagagctgttcgtgataaacccaagctccgccaacacacttggcatttgtgaatatgtaatgacgtaaaagtctgattctttcacgcccctgtctctcgtttgtaaggaagaaacgagctctgactgaatatcggatgcgagacgccggctgttctccccttcataatcagattgaaaatacgtttctgttcctgaagctgaagcaacccctgaattcacatgaatgctgacaaaaaggtcagcctgattggcacttgccttagccactctttcctccaaggtcagaaaatgatcgtcagaccgggatgcaacaggattggctacctcctcttttagtttgtctgtcacatgctctgagacagccaaattaatatccttttcaaagagcccgtttccgaccgctccactatcttcaccgccgtgtccggcatcaatatacactgttttcccttctatcggctctgctgcctgtgcacaaggcgcgagcgtcaaagccaatccgcacagcgccaagctcctccataacattctcaacttactccctccggtcacgagttctttcgcagctgaatatcttccagctgtaaagttccattatccttctttgtatatttcaccaggacatgtgtctgatctggcagtgattcacattcatcacgtttatccttcggaacttgtatcatggtttcttctccattaagagaaaccgcaatcgtatgaggatcagccgagccaatgtattttccctcttcggtaaaccttggcactgagtcatccgcacttgcaacactgcaccccgaaagaaagagcgcagtaaacagcaaaagaaccgtttgtttcacatgaccacctcttcctgatgtttggcttttatctttgaccagaatggcgaatttgtaaagacaacgcgaatgcaggcgagcaagttccatgattttcaaaagggctatacgacccgatcatttcctgttgttagaaagataacgagcagatttgtctatgaggatggctctaattgaggcgtcaattagaaaaaattagcggaaagaagcaactttttattcattttaaaaaatttgagaatagggtgagcaaatcgtttgacgggtgggtcagccaagcgtaaccttttaaaggatatttactttattgaaagaagttaaaaccatgaaaaaattcgttctgctgctggcggcagctgtcatcacatgctccatcggccaccaaatcagcggcggctacaaaggccccgaaaaagagcggcgaaaacatcactctgcactcaagatattcagtcggtaaagcagatcaattgcattaatttttacatataggctagaatatgtgcgaatccaaacgaaagaagatgatcaaatgaatcctaagtataagccactttttgaaccatttacgtttaaaagcggcgttacaatcaacaaccggatcgcagtagcaccgatgactcattacgcttctaatgaagacggtacaatatctgaagcggagctcgactacatcatcccccgttcaaaagagatgggaatggtgattacagcctgcgcaaatgttacaccggacggaaaagcattccccgggcagccggccatccatgacgattccaacattccaggtttaaaaaagttagcacaagccattcaggcacaaggcgctaaagctgttgtacaaattcatcacggcggtattgagtgcccgtctgagctcgttcctcaacaggatgttgtggggccaagtgacgtgtttgataacggcaaacaaattgctcgcgcattaacagaagaagaagtggaaaacattgtgaaggcgtttggagaagcgacaagacgcgccattgaagtcggctttgacggtgtcgaaattcacggtgcaaacggctacttaattcagcagttttattctccgaaaaccaaccagcgcacggatcgctggggaggaagcgatgaaaaacgattagccttcccgctcgctattgtcgatgaagtgaaaaaagccgcttcagaacatgcgaagggtgcgttcttagtcggctaccgcctgtctccggaagaacctgagacaccgggattgacaatgactgaaacttatacgcttgttgatgctttaggggataaagaattggattatcttcatatctcactgatggacgtgaactcaaaagcgcgccgcggtgcagatccgactcgcacacgcatggacttattgaatgaacgtgtcggaaacaaagtgccgctgatcgccgtcggttccatccattccgctgatgacgcgcttgccgtcatcgaaaacggtattccgctggtcgctatgggacgcgaaattctagttgaccctaactggacggtaaaagtaaaagaaggccgtgaaaagcaaatcgaaacagtgatcaaaggcacagataaagaaaaatatcatttgcctgaaccgctatggcaagcaattgtgaacacacaaggctgggtgccttataaagattaatgtgcaaagactgccgaaacgattcggcagtcttttttccctttatataaatagtttgtgtacacatctaaacagcaaaagaaagagctccccaccaacttcgaaaagaaaatccaggaaaaacccctcacgctttcttgcttttttctttttcattcgtacgtctcctttttacatgaatacgccttacttacgattttgcaggagaaaggtttcattttataacggacacatctagggtcgatcatgcttcgtgatcctataagatgtatgaatggaccaagagtgcaggtaataccgccatttgctttccttacttttcaaacctatcctttactatatgcggatacttaatattcttctcccatactaacaaatgtccccaaaacaaaacgcctcctatttatcagcgcaaactaataaataaaagacgtttgatttaatgaccacttaataagctcatgtttaagaagccttatgttctaatctcagcttatccgcaaccattgcaatgaattccgaatttgtcggtttagcttttgtcatgctgacagtataaccgaacaacgaggaaatggaatcaatgtttcctctgctccatgccacttcaattgcatggcggatcgctctttctacacggcttgcggttgtgttgaattttttggcgatgtccggatagaggacttttgtaatgctgccgagcaattcgatgtcattgtataccattgagattgcttcgcgcagatagagatagcctttaatatgggctgggacgccgatttcatggataatgcttgtgatgctcgcgtcgagatttttcttctttggttcaggctggctgctgcgtataatactgctttgcgatgatggcgcacgatgcgtcacactgctggcatttccgctgacctggcggatatggccgacaaggttttccatatcaaacggtttgagaataaagtaggacgcgcctaaatcgacggcctttttcgtgacatcttcctgtccaaaggctgtcagcataatgacattcggctgttttttcagatctgattccctcagcctctctaaaaccgcaagtccgtctaaatgcggcataataatatctaatacgagcacatcgggatctttttctttaaacagcgacaggcattcctgtccgttataagcaacgccgatcacttccatgtcttcctgtccttctatatattcacttaacaggcttaccagctctcgattatcatcagcaacacaaactttaattttctccacgtttcttcctccccaaatgtagttaacaggattcacccttgctacatgtttacattcgacaaaaccgctatataccctctaaaaaaatcataatcaccaatattagtggcatatctttgttattctatgtttttctctgtttttcgactaaaaatgaaatttgacaaacaaggaaacgtgaatttgtcgaaaaatcttcttttgtatattttaccgtatgtattctgagaagtgaagagggatcaaaataaaaaaactgccggaaactccggcagtcagcttgctttttcttttccataaatatcgattcctgcttctgacagcatccattcaatatgaacaccgtagccgcttgtcgggtcatttacaaatacatgggtgacagcaccgatcacttttccattttgaatgatcgggcttccgctcatcccctgtacgatgcctcctgtttctttcaacagtcttggatcggtaattttcaacaccattccttttgtcgcagggaatttttgcggcgttgtgctgacgatttcaatatcgaatttttctactttgtcatcatcaataacggttaaaatttcagccggcccttttttgacttcggtagaaaacgcaaccggcaatgcttgatctgatatgttgttttgaatcggctgatgcagtgtgccgaaaatcccaaacgggctgtttctgttaatatccccgatcgttttgcgttctgaggaaaatcgcgccagtttttctcccggattaccgcctgtccctttttcaattgatgttacagtggatttaacgatttctccattctccactacaattggtttctttgtgtccatatcggaaatcacgtggccaagtgctccgtatttttttgttttcggttcataaaaggtcatagtgccgatgccggcagcagaatctctgatatataacccgattctgtatttgccttctccttcatccttttctgggatcagcttcgttttgattttctgtttatcacgtttgatcagtaagtctaaagattcaccagttttcccagccttttgaataaatggggctacatcattcattttttcaattttctgtccattcatctcaataatgatgtcgcccgcctcaattcctgccgtttctcccggagattttttgccttcacttgtattgatttgatgaaatccgacgacaagaacaccgacggaatgaagttttacaccgattgattgtccgccaggtataacttttaaatcaggaagaacatgcacttttgtttttttaattggaaatccggcaagatcatataccaattctgactcacctgattttttgcccgtcaccttgatttcatgcggatctttctttactgtaaacgcttctgaggattctgatgtctgagcgtttaccgataaactcgtttcaatcgcttgtgtttgggtttcaaatactctcatttgcgttggaatcagtaaatattcttttagcggtttgcataaacctacacttaataacgaaacaaggagaattaaacctactgcttttctgatgttatcgggcattcactacttcactctcctcgctcctatcccacaccttctttatgacttgctgctacatcatttaattttgccttctgacggcttatttataactgtcatatgaagaaaaacattggatatactgatgaacgaatggatgtgcacgaaaaaaataagctgcgcttctcgcgcagcttacccagttgttttgacttgatccgcttgttttaaaagttctttcgcatggcgtttcgttaaatcggttacctcgacacctgcaatcatgcgcccgatttccgctaccttttcctgcttagacagcggcttgacacgtgtcgtcgttctaccgtcttttaactccttcgcaatataaagatgcgtatcggccatggcagccacctgaggcaggtgtgtaatgcacagcacttgtgaacctattgacaccttatggatcttctcagcgattgcctgtgcgaccctgccgcttacaccggtatcaacctcatcaaaaatgatcgatgtcacatcctgttgtgaggagaaaatgctttttatggcaagcatcacccgtgacagctctccacctgaagcgactttcgaaagggattttagcggctcgcctgtattggttgaaattaaaaacttcaccaggtcaatcccttgttcagtcagctgaacgggctggccgtttacaagcggcgcctcttcattgcgtgacgctgttctgaccttaaattccgtatcaaaagttgatttttccatgtacaggctttttaattcccgatgaatctcatcagccagctttttcgcccatgtttttcggatttgtgacacatttgccgcttccactgcgacatctttgccgacggagtcaagctcctttttcaagctttgaaggtggctgtccctgttttcaatttggtcaatctcttcttcaattttagaagcatattccaaaatgtcttcaacagtggcaccgtattttcgtttcagctgtttgatttcattaagtcgcgtctcaatatagttcaggcgttccggatcaaattcaagctcatccagcatatttctcatctgaaatgtggcatcctcaagcaaatagtaggagttcgaaacactttcagacatttttttcagcggttcgtttatatcagatatatcttcaagctgcgctgatgccattccaacccagtccaatccgccctgctcactgcgaagcgcgttatatgcattttgcagcgactcatatatcttctcaaagtttgaaatttgctggcgctcttcttggagctgttcatcttcgttaagctcaagctttgccgattcgatttcttcgagctgaaattgaataagatcaagacgatgggccatttcctgttcgctttcagaaagctgcttaagctttttgagcagcttcacataccgctggtacccttcctgatacgttttgagcgcgctttccacttcggccccggcaaacttgtccaaaagctggagatgattttcgtcttccattaacagctggttatcgtgctgcccgtgaatatctaataaaagcctgccgatctctcttagtgaagcaatcgtgacaagcttgccattgacacggcaaacgcttttcccgctcgtgctgatatcccttctcatgacgatcatttcgtctgaaacgtcgattccctgctcagcgcatacgcctaaaacaggatggccgctctccaacagaaacagcccttcaagttcggcttttgcttccccatatctaacaaattcagatgatccgcggcctccgactaaaagagaaatggcatctatgatgatggatttgccggctccggtttctcctgttaaaaccgtaagcccgcgttcaaaagaaaccgtcagttcctcaataatggcaaagtttttaatcgatagttcagctaacaaacagcattacacctcttatctttgttagattttctgttacagcagttcaaggagcctgttttttacgccttctgtatcttcaggagtccggcaaataattaaaatcgtatcatctccgcaaatggtccccatcatttcatcccagtccaaattgtccatcagcgccccgattgcctgggcattgcccggcatcgttttcagcacaatcatatggcttgctgagtctattttcacaaatgcgtccatcaatgcccgctttagctttgacagcggattgaaacgctggtccgccggaagactgtatttgtaagaaccattatttgtaggcacttttacaaggtgaagttctttaatatcccgtgataccgtggcctgcgttactttgtatccatcctgctttagcatgtcgaccaattcatcctgtgtttcgatttcattgcttgtaatgatctctctgattttaatatgcctctggcctttgttcatgtaagcacctctatttccaagcttatctgttcttttatgttatatgattctctgcacattgtacatgaatgcagaaaaaaggaataatagcgccctattattccggtacatctgcttttttttcttttaacgtcttatgtgcttcttctacaacgcgcatgatctcttcttccggcagttcctggccttcctgtccctctcccggccaatgcaaatgaaggagaaactcaatatttccgtctcctcccgtgattggagaaaatgacaagcctttacagatatagccttcagcggcagaaaaactgatcattcgcttgagcacatcagcatgcactttaggatctctaacaatcccttttttgccgacggattcccgtcccgcttcaaactgaggcttaactaaagccatgcagtcgctgcccggtacgagcaaagtccttaggacaggcaggatgagccgcagtgaaataaaggacacatcaattgtggcaaactccggcatgccctttgtaaagtctgccggtgttgcataacgaaagttcgtccgttccatcacgacgacccgttcatcctgtctaagcttccatgcaagctgattatagcctacatccacagcgtatgactgtttagctccattttgcaaagcgcagtccgtaaaaccgccggtggaggagccaatatcaatcataattttatctttgacagagacgggaaattccttcaacgctttttcgagctttaagccgcccctgctcacatacctcagcgggtttcctttgacagttaacggaaggtcgcggtcaattttttctccaggcttgtccaagcggttttcgtttgaatagacgatccccgccataatggctcttttggctttttcacgcgtttccgccagccctctttccactaataatacatctaatcgttctttctttgacgtcatgatccaattcctttgtgtgtctttggcggcatcagtaatctaatacgatttgccacctgctgttttgtcagtccaatttcctcaagaagcgctgttacacttccgtgttcaataaaccgatcaggtatacccattctgtcaatcggagtatgatattcaccttgatcatgagcgaattctaaaatcgagcttccgaaaccgccttctaagaccgcttcttcaattgttaaaattggcaagccttcttttaggatactcttcatcatcttttcatcaatcggcttaataaaacgcgcattcacaacgcgcacggaaaggccttctttctgcagctcttcggctgcttcaatcgccatttcgattgttgtgccgaatgttaagatgacagcatcgttccccggacgcagcacctcccacgtaccgatcggaatcgttttcaactgttcatccatttttacgccgagtccgtttccgcgcggaaaacgcatcgctatcgggccttcgtcatagctaagtgctgtatgaaccatatgctggccttcattttcgtctttcggcatcattaagaccatgtttggaatgtggcgcataaacgcaatatcaaacacgccttgatgtgtctctccatcagcgccaacgagtcctgcacggtcaattccaataaacacattggcgttttggcggcagatgtcatggacaacttggtcatatgccctttgcaggaaggttgagtaaatcgccaaaaacggcttcataccctgcattgccatagctgccgccatcgttgcggcatgctgttctgcgattcctacgtcgaacatccggtcagggaattcctttgcgaaaccttcaagctttgaaccgacaggcatagccggcgtaatggctacaatgcgtccgtcctcgcgcgccattcgctgcacagttccgctgacaagaccgctccacgaaggagctgcggctttcggctttacaaagtcaccggtattaattttatatggtccggtaccatgccatgtcccaatcgtatcggtctcagccggtttgtaccccttcccttttttcgtgatgacatgcagaagaacagggcctttcgtttttttggcgtattgaagattctcaatcagctcatgataagaatgtccgtccactggacccaaatacgtaaaaccgagctcctcgaaaaacattccggagacgagcatgtatttcaggctgtctttgactcgttccgccgtggcggcaagcttgcccccaactgccggaatctttttaaataagtattcaagctcatctttgacccactggtatttccccgcagtacggagccgtccgagcatagagtgaatggcaccgacatttggtgcaatactcatttcattatcattaaggatgacaatcatgtcttttttctcgtcgccgatgtggttaagggcttcgagcgccattccgccggtcagcgcgccgtcaccaattatcggaataatatattcatccgttcctttaatatcacgggcagctgccattcccatcgcgcctgacagagaagtcgagctgtgcccggtttcccaaacatcgtgctcgctttcactccgctttggaaatccgcaaagccctttgtactggcgaagcgtcgcgaattcttttcctcgtcctgtcagcagcttatggacatacgattgatggcctacatcccataaaaatttgtctttcgggctgttaaattccttatgcagagcaatagtaagctctacgacacctaagtttgggccgatgtggccgccggaagcggataaacttgtaattaaaaactgacggatttcatcacttaatttctctaattcatcaatggacatgttttttaaaaacgacgggtcctgtattgataaaagatccaaagcggatcaactcactttcagcatgaatttctgcaatgatacatgtcttttgcatgccgagctgacaataatctcagacataaaaaaagacaaacgcgcttttccttttcatttttcatataaactgcttacattttaccatacctcgtgcagccgcttcaaattaggatcgttttagtgatctcttgccgcaattaaatcacaaagctcatataaaaggtctttttgaagagagagtccgccgatcaatcgcttcgcctcttttatatgaacatccaatttatgtttggccccttccaatgaaagaagcgacgggtatgtcgatttgtcatttgtggtatccgagccgacacgtttgccgattttctcttcactgccttctaaatctaaaatatcgtctctgatttgaaatccgattccaatgtggctgctgaaggtacgcagtgtttcaatgtcttcctcaggcgcatcagccaaaatagcaccggcgattacacaaaagccaaggagcttggcagttttccgttcatgaatggattcgagctcttcaagcgtgacttgtcggttttccgcttccatatcagctacttgcccaccgaccatgccttcggtgcctgccgctgaaatcagttcattcacaagccgcaggcgcttttctgctgacacctcgtctgacacgtgggaggtaatcagcttaaagctttctgtgagcagcccgtcacccgctaatactgccgtcgcttcaccaaacactttatggtttgtcggcttcccgcggcgcaaatcgtcatcatccatgcatggaagatcatcatgaattaacgaatacgtgtgaatcatttcgacagcacagcccaccggaatgccgtctttttcgctttttccatatgcatttaaaacagccagtacaatcagaggccgcagccgctttccgccggcctgtagagaatacagcatagatttctttaatgagtccggcatatcaagcttttctgtatagacagaaagctgattttcaattgtttttttccggtccgccagaaagctcgttaatttatttgtcaccttcgtcttcctcctgaacactgaaaggtgccagttcgccgtcttcttttaaaatgaagtccatttgcttttcgactttttgcagcttttcatggcacatttttgacagagccatgccttcttggaaatagttaatggcttgctctagaggcacatctccctcttcaagctttgatacaatgctctcaagccctttcatcgcttcttcaaatgtcatgttttcattttttttcacgtctgtcatttttcttcccctctcttttctaatacttcacaggtcagcacgccatccttcagcttgacttcaagccggtcctgctcttctatttgactgacacttttaatgagtttatcttctttataagccaagctgtatcctctttccatcacttgaagaggacttagtgcattcagcttgccaagaacggtttgaaattgggaatgcagctgcttcatttggatattcatattttttctcagctgatttgtttgttcctggtatcgtgttctcgcttgtttcagctgttcatgaggatgcagtgcctctaatctgtacgtttcacgctccagctgtctgcttttccgatctaaaagagcggtcagctgtgcttgaaactgctggtacgcgaggtcaaactgctgctctttttgcgcatacaaacgctttggaaaacgaaaggcataggacgattgcagcgtttgaatccgttcttttttctggccgaggtgctgctgcatcgctcttgtcattctgacttccgctgtttttgtccgttcgattaaatcagtggtatgaggcacagcaatctcagctgctcctgtcggcgtcgcagctctgatatcggcgacaaaatcactaatcgtaaaatccgtctcatgtccgactgccgatataatcggaatattggaagcaaagatggcgcgtgctacaatttcttcattgaatgcccacagttcttctatcgaaccgccgcctctcccgacaattaatacgtcgcaaatctctttttcatttgcctcttcaatgcgcgtaacgatggatctgctcgcattttcaccttgtacgagcgctggaagaacaatgacttttacaaggggatatcttctttttagagttgtaataacgtctctgacagcggcacccgttggagatgtcacaaccccgattgtggctggaaatgcggggatttgttttttgtagcggtcgtcaaataaaccttctccggcaagcttcttttttaattcttcgtacgctaaataaagcgctccaatcccgtcaggctgcatttctttggcatataattgatagtttccgctcggttcatatacggaaattccgcctctgaccagcactttcattccgttttcaggtttaaaaggcagacgctcgctttgtctcgcgaacatcaccgactgcattcttgcgttttcgtcttttaaagtgaaataaatatgccctcgtgtgtgtatctttacattcgacaattcgcctttaatccaaatattttcaaggtgaggatctacatcgaattttcgttttatatactttgtcagcgctgagacggtcacatacgctgcttcacccatgtctaaaaactcctctcctaagcattcctgcaccataactaaagaaaacccgccctggctttaggagcctgaagaagcgggtatcgtgctcatattcaaggcgggcaaacatttcgcctgtgaatatctccaattatctatgataacgtacgtttcgcagatttaacagtattatgcgcaagcatcgtgatggtcatcggacctactccgcccggaaccggcgtgatgaaggacgctttttcctttgccccttcaaattcaacgtctccgcaaagctttccgttttccagacggttaacgccgacgtcaatgacaacagcgccctctttgatctggtctgcactgatgaagttggctctgccgactgccaccaccaggatgtccgcttttttcgtatgttcagtaatattttctgttcttgaatgacagtaagtaaccgtcgcgttttcatttaataaaagctggccgacaggtttgccgacaatgttgcttcggccgactacaacaacctctttaccggaaaggtcaatattggttttcttcaaaagctcaacaattccatgaggcgtgcaaggaagaaacgtatcttcgccaagcagcattttccctacgtttaacggatgaaaaccgtctacatctttatcaggggagatacgttcgatcaccgctttttcagaaatatggtctgggagcggaagctgaacgagaatgccatgaaactcagggtcttggttatattgatcaataatggaaagcagttcagcttctgtgaggctgctgtcaaattgatcgagcttgaaattcattcccattgtttctgccgcttttttctttcctcgcacgtaagagtgagaagcaggatcatctccaatcaaaataaccgccagtccgggagtgacgccttgctttttaagctcttctacctcttttgccaattgttcgcgtttttctctagccgtttcttttccgtcgatgattgttgcagtcattttctttcctcctatgattgttcaatatcagatttaatgttagaaagaaccccgtttacaaactttgtcgctttgtcatcaccaaaccgttttgccagctcaatcgcttcgttcatggagacattcaccggaatgtcttcggcatatgccatttcatatgctgccaggcgcaaaatcgcacggtcaacattggcaatccgatcgagcttccaattcaccagatgcttggagatcatttcatccagctggtcttggtgttccaataccccgtgtacaagctgttcaaagaaaggatctgttttttcttcatccagtgcgtgttctatggcttcattcactgcaatatcgctgacatcaatttgaaatagtgcctgcaaagctttttctcttgctgttcttcttttcattttctttctcctttgatcctctttatccgcttgtcgttaagccacaaagagatcataacatatttttttcgtatccgcatattgaaatcaaggtttttttaccctattaccgaatattttcacacaccttaatatgattattcggatttcacgttcatgaagaaactcggctatgtaagccggctttcttcatgctttgaaataaagggtaacgtgtaaaaaaaccaaagggccgccctccccttggtttcgtgttaagccatttacatttcttcgtcgatttggacttcttgggcttttgtgtcaaattgaatgccgacgatgtgaatattgatctcgttaatcgaaagagacgtcatatttaataaggtttgacgaatgttttcctgaacggatgctgcaactttcggaatcgaaacgccaaatgtaacgacacagtatacatcgatcgtaattccgtcatccgccaggtcgactttgacacctttgccatgattcactttgccaaagcgctcaacgacgcctgtcgcaaagtttccgcgcatttcggcaactccatcaacttctgatgctgcaatgccggcaatgacctcaatgacctccggtgcaatctcaaccttacccaaatgcgtatcttcgtgatccattttaagcaagctgttgtctttcattcaattcacctccgtaaaaattatgagcccattacatcatatgtttctaaaaatttcgtattaaactctccgctcacaaatgtttcgtgttcaagcagttttaaatggaaagggattgttgtctcaatgccttcgatgacgaattcgctcaatgcgcgcttcatgcgggcaatcgcttcatccctcgtttttccgtatgtgattacctttgcaatcatgctgtcatagtacggtgggatggaatagccagggtacgcagctgaatcgacacggacaccaagaccgccaggaggcaggtacattttaatttcaccaggtgacggcatgaaatttttacttgggttttctgcgttgattcggcattcgatggcccagccttcaaattcaacatcttcttgcttgaggctcagttccattcctgatgccactttgatttgttccttgatcaggtcagttcccgtcaccatttctgtgactgggtgctccacctgaattctcgtgttcatttccatgaagtaatagcgctgttcattgtagtcatagataaattcaactgttccagcacctgtatagccaaccgcttttgcagcctttaccgctgcatctcccatttgctccctgatttctgaatcaagggcaggagatggtgattcttccaaaagcttttgcaggcgtctttggatcgagcagtcgcgttcgcccaaatggatcgtatttccgtagttatcagcaagcacttggatctcaacgtggcgaaaatcttctatgtatttttcgatgtatacacctggattcccaaatgcagttgccgcttcctgctgtgtaatcttaatgccattaatcagttcctcttcagtgcgggcaaccctaattccttttccgcctccgcctgcggtggcttttataattacaggatacccaatttcattagcaagcgaaaccgcttcttccacattttctataattccctgtgaacccggtacgattggcacgccggcctgtttcatcgtttcccgcgcaacgtcttttgttcccatttttgaaatggcgtcagcgctcgggccgacaaacgtgacattcacttcttcacataattcagcgaaatcagcattttcagctaaaaatccgtatcccggatgaatggcgtccgtgccagtcagctttgcaacactcacaatatttgtaacgtttaaatagctgtcttttgatgctttcggtccgatacaaaaagcttcatcggccatttgaacatgaagggcatctttatcagcttctgaataaacagcgacagtctcaattccgagctctctgcaggctctgatgattctgacagcaatttctcctctgttggcgatcaatagctttttaatcatgttcagtctccttactccgcttttacaagaaatagaggttgtccgtattcgaccagctggccgttttctactaatacttcaacgatttcgcctttcacttctgcttcgatttcgttgaaaagcttcatcgcttctacaatgcagacaactgtgttttcatttacttttgaaccggctgttacatacgggccagcttccggtgatgaagaagcataaaatgttcctaccattggtgaagtgattttatgcagattctcatcttgctttggtgcttcttgggcaggtgccgctgcttgctgcgcttgcggctgaactgcctgcggagcctgtgcttgtacaggtgctgccggtgcctgctgcatgacttgaaccgtgcctgcttcgtgttttttcagttttaaggatacaccttcattttcatatacgaattcgtcaattgtagactcgtcaattgctttaatcagctcgtggatttctttgatatttaacattcaatcgcactcctatgtatgaaatttctttttttataggttactgctaaaagtacatactatgttcatcttacaggagcggacttttgaattcaactctaatatgacagcaacgcaaaaagcccgcttgtttagcgggcttttttccctcattcttatttagagggttcaaatgtgacagcgacatctttcattgttttgatttcttttgccacaaggtctataatggctgtcgccttcgatttagagtgtttgtctgatttgactgtaatattgattttatctccttcagcattaacaagcgcatcctcgtaaccttgtgttttaatcagcgtttccagctgtttttctgttccttccacttcactgagagccgtcattttatcgtatgcttcgcttttctccttggctgttgcatcatcgcttgacacaatggcattcagctcttctctttctttgcttctggcatcttctaaatcaagacggtacgttgtaaacaaatcatcatcggctgtttccgtaacaacagttcctttttcactggcttcagcggatgtttccttgtctgctgatgaatctttcgttccctttgttccatcttcttttcctttttcagtttctgtaccgcttttttccttcgtgtcttgcttggcaggcgctttttcagttgcgacctctccgctgtcagacgcgcttttttcactttgcatctgcacggcgtttttgctttccggcgacatgatatagtagacgcttaacaccacgacaagactgagcattgttaatagccaaacggtttgttttttaagcatttatgaatcctcctttatttttttaggggcaaccgcaacccggtggcttggaacatccaggacccgtgtcaccgcttcgataatggtttgttttatttgaacgttgtccactccttgagcaacaacgagtacaccgcgtatatcaggttttttcgtttggacgacgacaggtgtttctttatcgccgtttttgatcatgacgatttcttcctccgatgtttggtctgtaacgcttcttgttccgccttctttgtcagtttcttcggtggttgtatttttgtttgatttgtttttttcgtatactttcagcgacgttgcatctacattcacgacaaccgagacatcgtccacaccaatgattgtttcaagaatttctttcagctgattttcgtattctttttcatagtcatcgatcgagtctttaggtttatcagattttgaggctttaaacacttcagctgttttctctttgctgcccgcggaatgttgcgatgatacggccgttatcgttttggcgttttctgttttctcaggtgaagaaaacagctggctgacaagcataaaggaaactccgagaacaaaaacgaatagaaagtaatgatatttggtcagcttcggcttttcgccgtccttcgtttgtcccggaagaaactgctttttcaatacattccataatccgtttttattcattgccgacactctccccgccttccatatgaaccgtaattttctcacttccgatttcccaaatgtccgcgagctgcgtttgtatctgtttggcttctttttgttcggctgcttctttcgttacgtatgcatgatctgtatcaatgtggaccggcgcgaccgtttggaccgttttttcagaagacggggccatatacacgctgattgttttaatatcctcttctgaatctaccttttctcctgccgtgagtttgatgcggcctactttatattcatcatgactgaatctctcctccgctttcttttttagttggacagccatttcttctagaatatatgcgcgctgggaagcttgtatttctattttttttgaattgatttgattttttatgtcggcagactctgactgcccgttttttgtgagatattcaaagatgatttcggggtctgtcttgaaaagtttaaaaatcggcgtaagcatgacgacaatcaagagcaggctgactaccatttttgcgtacttttgcatgctggagctcggcagcagcatatcaatcacaattgcaaataggataaacaacacgatggtggtaagccattccgttaaaaaactcattcgcctgcctccttcatttcatcatcatcgtgaggtttccggctgtgattatgacagtaaggcttaaaaaaaacatgagagacacaatagcgagagctgcaaaaatataaatgacgcttttgctgatgacgtcgaggcaggtgatgacgggcccgcctcctagcggctgaagaatcgcggctgccagcttataaataaaagcgagggaaagcactttgattgccggaaatgccgcgatacagatcaaaatagcaacaccgagaatccctaccgtatttttcagcagtaaagaggcgctgattactgtatctgttgcgtctgtaaacattcggccaagcacaggaataaaatttccggttataaatttagccgtcctgagcgtaatgccgtctgtcactgcagctgaggctccctgaacagagatgacgccgagaaagatggtaagaaaaacagccagcgctccgatagcgatatttctgagcaggttagccagctgcgttactttgtattgttcggtcatggtgctgacaatgctcagaatcgctgataagaaaatcagcggcatgacgatattctgaatcaagagaccgctcgtgttcatcaggaagaggataacaggatgaaagaaggcagcagatacagctccgcctgaggaagccaaaagcgccaagaggagcggaatgagcgccaggataaagctggtcatcgtctgaatcgcctcagttgcatagttaattgccacatgaaagctattaagcgcaaggataatcagcaccatgtacacaattgagtaagcgaccttactgacggtgctttgctgaaaagcattttgcagaagctgcagaatgacgcaaaaaatcgtgagcaaaatcaatgtgcccagcagctttccgttggcaagcacttcatgaaacaaataagaaaagagagctttcagccattcttgcggtgagaatgatttatcgccattgataaactccattaagctgcctttttggctttccggcagcagtccgccgtattctgtcataatgtcattccaaaattccccgatcttatctgtttcaagcgaggctgctgtcctttccgctaattgctcagctgtttcagcatggtcttccgtttgttctgcattaccagctgcttgtacaatttctgcacggcctgctatgatcagcacggccaaaagcaaaacccattgaaagcgcttcaatctaccgcctcctttcggttatgacatagaaggtataagtccgagaatcgtttcgataatgacggttaaaataggcacagccataacgagaattaaaatttttcccgccaattctattttcgaggcgatggccccttggccggcatcttttgtgagctgcgccccgaattcagcaatataggcgattccgataatctttaaaatggtttcaacatagaccatgttgacatttgcattaatcgcaattttttctatcattcgaataatgtcgtagatttggtctactaaataaagaaaaatggcacatccggcaaaaacgacgattaaaaacgcaaaagtcggcttttgttcttttacaattaaagaaaggaaggtggcgatcagccctaaacctacaatttgaacaatgtcaatctgcaagcccccctatccttggaataaaaacacagcttttatctttttaaataggtcatctacaatcgtggcgaccataaataaaatatagataaaacctaacagcgtcacccactgagcgtattctttcttgcccatctgatccaatatcgtgtgtaaaaaagcgaccacgattcctactccggcaatttgaaatatgacattcacgtctactcccattttatttttgctcccctcacgtttacatcaatagaagaatgagtaacaagcccgctaaaaagcccaaactttttatcattttttcatttttcgcttgcgcctgctcagcatccgcttcagaggcttccaaatgtgtcagcgccagcttgatgtgcttttgctgagagattcgatcatgaatcccgagcgtctcgccaaactgcttcagcacttcgtattcgctttttttcaaagacagggtgtcccataccttctttaagctttgctcccacgccgttttcgcggaatcacttcccttgtccagctgatcactgaatgcggaaaaaagagctgaaacaggctgtgcgagctgtttggcaatctgctgtgaagcagtatgaagcggtgtatggccgtacatgatttcagcctcgagggattgaagcgccgcacgcagctggcggatttgccgcggccgttctgtataaatcttcgccatctcaaaacctgtccatgttgtcgctaccacaataaatacagcgcccagcagcttcagcatgttttcacgcccgtcgtcctagacagcacatttccgtctttgtcataaatttggctcactgtgcccggcccttttgctcttgataattccaaatagcggtcaaaggctctttcttcccacaaacgcttcaatgaaggccgcttcatcaggtcggatatgctccagccatgcgccgatacaattactgaaacaccagcatgcagtgcctccagaagtgcatctgtatcttccatacgcccgatttcatcgacaatcatcacctcagggctcatggatcgaatcatcatcatcagcccttcagcttttggacaggcgtctaacacgtcaattctctgaccaaattgatgttgcggaatgccgcgaagacatccggcaatttctgaccgttcatcgacgattcctgtctttacgggcagcatgggttttttgccggtgcttgagagcctcgcaaggtcccggagaagtgttgttttgccggtttggggcggtccgataatcagcgtattcagccagctgtcttgatataagtatggaagcagcggctccgcaatccccagcttttcccgggcaattcgtatattaaaagatgcgatgtcacggaggcctttcacacctccgttttccgtaatgactctgcccgccagtccgactctgtggccgcctctgatcgtgacataccctttcttcagctcttcttcaagagtatacatactatagttgctaagccggctcaggatcagatgggcatcctctgccgtgcccgcataggacaaataaacaggttgtcctcttcgaatcaattcaacagggcggttgatccgaattctgacttcttcgatttccagccattgttgttccggtatttcagaaagggcgtttttcatggattcggggagaacctcagcgatttcattcaacagagcctcctcctttctaccgattggcttctttaaaatgtatgatgtgaggcagactttatgacaagcctctctttatttatgaacacccgccaaaatcaaaacaacacccgtaaaaatcagaatcagctttgcatacgaaagctgcccggcaatttggtagattccgacagtcatcgtaatgataaaaatcaacggaccgacaatagcgagaatgctgttaaccacaaccgccttccggacatcgttggtcacaagcatgacaattgctgccgtcagctcaatcatagaggataaaactcgtaatcccgccattgttaaaacagtagaattgatatttccaagtaaaaatttcatagcactctcccaacctcccatttttttatatgatatgctctagcttggtgaagtagtcttgtcattttcgtataaaagaaagattctgtttttgggcacaaaaaaagcctgctcccatttgggaacagacttctttttttctttctatgctcttgaaacgtaagaaccgtctgatgtattgacaacaagtgtgtcgccttcattcacaaagaacggcacgtttacaacaagcccggtttcagttttcgcaggttttgtaccgcctgacgctgtatcacctttaataccaggttcagtttcaacaactttcagctcaactgtgtttggaagttcgataccaagtgtttcatcctggtacatcatgatatgcacagacatgttttctagcaggtattttaattcttcttcgatttgagttgcgctcagttcaagctgctcataagaagaagtatccataaatacgtgctgatctccgtttgcatatagatattgcattgttttggtttcgatttgcgctttcgctactttttcaccagcgcggaatgttttttcctgaatggcgccagtgcgaaggttgcggagtttagagcggacaaatgccgcaccttttccaggttttacgtgctggaagtcaacgacgcgccaaatgccgccatctacttcaattgttaatcctgtacggaaatcgttaactgaaatcatgtttaatgtcctcctatattccaatcacaaaataataagttcttttggggaatgggtgattgtccggttgccgttttctgtaatcacgatgtcatcttcaatgcggacaccgcctgtttctggtatgtaaatgcccggctccactgtgaccaccatacccggttcaaggatagctgaagatctgacggataatcccggagattcatgaacttccatgccgagcccgtgcccggttgaatggccgaaatagtcaccgtagccttttacagcaatatgatcccttgtgagggcgtcagcctcttttcctgtcattcccggcttaatatgtgcgacgccaagcgcctgagcatcaaatacaacctgatagatctccttcaattgatcactgggctgacctacagcgaccgtccgggtaatatcagaacaatatcctttataataagcgccaaaatcaagcgtaacaaggtctccgctttcaatcagtttgtcactggccacaccgtgcggaaggcttgaacgaaggcctgaggcgacaatcatatcaaaagaagagctgtctgctccctggcttctcatataaaactccagctcattggcaacagcgatttcagaaataccgggtttcataaacgtcaagatatgtctgaaggcatcatctgcaatcttcgcagcttcctctaatatcttaatctcttcactagacttaatcaagcgcaacttttccacggattcagccacaggcactaattcggcatcactgataacggcgctgtatgaagcgtaagtgccatatgtcatgctgttctgttcaaagccgagacgcttgatgccaaacgattcaacagtgtcggcagtggtctgaatcaagctgccaccatgttcaatgatctcaaaaccctttacctgaaccttcgcctgctcagtataacgaaaatccgtaataaacgctgctttgtcacccgatataacagccaaacccgccgaacctgtaaaccctgtcatatagcgtacattcgtgctgcttgtaatcagcatgccgtcaattcccagctgtccaaacaggtttcttaatttctctagcttcatcttgattctcccccttgctggcttaataagtagcgaacagcaagcttgtagccttcagctccaagaccgacaatctgccctttcgcaacaggagcgataaccgactgatgcctgaattcttccctggcgtataagtttgataaatgcacctctaccacaggaagactgatgcttgaaacagcatccctgatcgcatagctgtaatgactcagggcgccggggttcagaacaatcccgctgtattgctcctcagcctcatgtatcgcatctatcaaatcaccttcgtgattagactggaagaaagtgagctggatatgtaaggcttcagcaaactgaaaaagatctgtttcaatatcggtcagtgtctggcggccgaatacttcaggctcacgactcccaagccggttaacattcggtccgttcaaaatcaaaaaatgaggcacataatctctcctttttgcgagggtttctcatgtaaaaaatgttcacttctcgtgaacattttatcatactggaaaaggattatacactattctctatgcattcccagcgcacgtgcaagcttttccgaattcagctcattgtattcaaatgaaatggaatacccgacaaacagcccgtaaagcaaataaatgcaaatggtcgtaataattgtatctgatgtcagttcggtcaccgtgcgcacatctggaaaaatcggattaaaaacaaaaaacacgagcagccaaagcaccaagccgtataaaatacccggccacattgtttttaaacgtttcaatagaagaaaataaagaaatgctgcgccaattgaaattactccaatcaaaatgatgctgattaccgttcccagcccatgttttttccactctccgagcacaaacggctgcaatatcatattcgggctgatttcggaaaaatgaaacaaatatgcgatataagcaacgaaactccaaagtacgcctccgcaaaaacctgttgccgccaccctgccggccattgaaacaggcggcttttgcttctcattcaattcttcattttgttctgtatctttttcgcttgtcatcatggcacctccagttaaagtgtgcccaaaaaaagaaatgtcaataaaaaagctcacactttttgacagctgcgagtaaaatttgaaaataacgggtataatgcatgtagaaaaagcaaggctatggcaattttttcagcttgtcaatctagaggtttagcgctgtttcctgtacaatagagtgaaaggaaatggttagcaatcctaaagaaataggcaggttgataatatgtcaaaacataaagttccgcccgcttacggcgggcaggctgttgtggaaggcgttatgtttggcggaaagcatcattacgttacagccatcagaagaacggatggaagcattgacttttttaagcttccacgcaaacacaacccgaaactgaacatcgtgaaaaagatcccgtttttacgggggatcgcggccattatcgaagcgagtgcaaacggcacaaagcatttgaatttttcaagcgaacgttacgggctcgatccatctgaagacgagacacttgagcaggaagaaaaaaaatcctccgggctgtctatgtatctcagcctcgcagttataggcgtcctatcatttttgttcagtaaattcgtatttacattggttccagttttcttagctgaactgacaaggccgattttttcctcggacacggcgcaaatcgcggttgaaagcctgtttaagttgattttgctgctcggttacatctattttttgtccatgacaccgcttattaaaagagtgtttcaatatcatggagccgaacataaagtcataaactgttatgaacagaatttgccaattactgtggagaacgtccaaaaccaatctcggcttcattaccgctgcggatcaagctttattttatttacgattattgtcggcatgtttgtttatttactcgttccgacagatccgctttggctgcgtgttatagatcgtgtcgcactgataccggtcgtgcttggtatatcctttgaagttctgcagctgaccaacaaagtgcgtgacattcccggtctgaaattacttgggtacccgggactgtggcttcagctgttaaccacaaaggaacctaaggatgaacaggttgaagttgccatcgaaagctttaacgaacttctcagactcgaagcattgtctgagcaaaatcagaagccttctcacaacgtcatctaaaatccgttgccctgctattactttcggaggtggacagttatgaatcatcgtgtacaacctattattgctgtattaattgcgctgggagcgttcggtttcctctatgtgctggtaaccaatcccggagaaatggcaaaaatggcggtaaccgtcatcgtggcaggtatcattatttattttattgtgaaatatgtaatgaatcgaaatgcgggcagcgaaggagcagccttcaaaaaagcggcgaaacaatcgcggcgccggatgaaagaacataaagcaaaacaccgcgccggacataagggacgtgtcagccacctgcgaagcgttccgagcgccagcaagcctaagccgatgattctcaagaaaaaaagccagactcagctgactgttatagaagggaaaaaaaataaaaagaaaaacagagcgcttttttaataggtccactgctttaaaaacagctctgtccgtcttttacctagctcaatcagggctagttttttttgttgtgttaaatgaaaatcagttgccattacgccatcaaccgggagaaaaatgatattttgttcatagcgtgatgcaatgtgccttgcgtcatgggcatccttcatcgtttcaaacagggcgccgaacagttcaaaagcgttgcggatattttttttcggacgctctctttcacgcggcgcaagcgtcacaccgatcacagggcgctttctttcctttgaaaacagccagatggggaaattgcttaacacacctccgtcgacaaccgtggcggtgcctgtgtccgtttttaattttatcggttcaaaaaaatacggaatgctgcagctcattctgaccgctctggcaaccgggaacatatcgggatttaacccgtaacgggccaaatcgtccggcaaaacaatcatggtgccgtttgtcagatcagaagcaataaggcgcagagaccctttctgcaaatcgccgaaaacccttatgcctttcgctcttaacagatcagcaatccattcttctatcgtatcgcctttgtataagccaagacgccagtagatggacacccactggagcatttttaaggggagaaaagagtacctttgatccagcaatttctctccgtccacttcttcaattaaagcgtggatttccttactggtgtaacctgacgcaatgaaagcggcaataatggcgcccgcgcttgtacccgcaacccttttaaagcggaagcctttttcctcaagcgcttcataagcgcctgcaagcgcaatgccttttactcctccgccggaaaacacaccgtcaatatacatctcattccctccccctccatccgatcgtttattaccattttaagaaaacacgcgcagaaatagaccaactaatgacgggtggcgtcagcgtatcaaaaaagacggcctccttcgagaccgcctttttactgattatgatgttctgttttcttttggattgatttcagatcttttttacgggcatcatcttcttcaaaatattgaacaagatccccgatgcgatcaatactgttccagcttaaatgatgttcgattccttcgacatcgttatatattttctcttcatcaacaccaatgattcttaaaaactgctcaagcaattcatgtctgtataccagccgtttgcctatttttttccctttagacgttaacacgagaccgcgatatttttcataaattaaatattcgtctttatctagtttttgaaccatttttgttacagaggagggatggactgccaatgcttccgcgatatcggaaactcgtgcatatcctttttcttcaatcagcatataaatctgttcaatataatcttccatacttggtgttgtcatcgaaaccctcccaaaaagcaccttaactttataaaccattacaagtttacactaatgaacttgaaaaaacaaggatgctccgcgggtcaaaagccctgtttaccgcttataattccattcatctgaagcgtactttgtttcagccaagtgatgaacaaaatcaagctcttcctgagaaagttcatatggctccaaatgaatgttaagacctgtttcaaatccttctttaaaggctttacgagcctcatccatcgtcacccgcttttcggtgagttcattaatggcaaccgctttgtttttgaaattgcgctgcatccgctctcttactctttcacttggatataagaacagatcgaacagcttgtcctcatctaaatcaagaagaatggagccatgctgaagaatcacacctttttgtctcgtttgcgcgcttcccgccaccttgcgcccctcaaccactagttcataccacgaaggcgcgtcaaaacaaacagatgaccgcggattttttaagctttctttttctttttcagttctcgggatggcaaagtaagcgtccagaccgagatttctaaagccttgaagtatgccttctgaaataacccggtaagcctcagtaacagtcgccggcatctcggggtgctcttccgaaacaattacgctgtatgtcagttcctgatcgtgcagcacacctctcccgccggtcgggcgtctgacgaatccgagattatatttatgtactgcttcaaaattgatttcctttttaatattttgaaaataccctacagaaagtgtcgccggattccagccgtaaaaacggataaccggggggattttcttttcgctgtgccaatataaaagcgcttcatcaagcgccatattgaatgcaggacttgcattgcctgagtctataaaccgccaagtttctttttgcattttaagaccttccttaccgttttaatagaatcagtttatcaaactgtcgggaaaatgaaaaatattttagttccattatagatgacaatcacgctgtgctttactataatagtatttgtcgaaaacggctctatgaccttgttttatgaagcagggttttgattttatatgctaaaggagtagaatcacattgtctaatatgatcgttttgattatttttgctgcgtttatcatctatatgattgcttcatatgtctatcagcagcgaattatgaaaacacttaccgaagaagaattccgcgcgggttaccgcaaagcgcagcttattgacgttcgtgagccaaatgagtttgagggcggacatattttaggcgcccgcaacatcccgctttcccagctgaaacagagaaaaaatgagatccgtacggacaagcctgtttacctgtactgccaaaacagtgtccgcagcggacgcgcggcacaaaccctgcgcaaaaacggctgcactgagatttacaacctaaaaggcggctttaaaaaatggggcggaaagattaaagcgaagaaataaagcaaacagctgtctggtagacagctgtttttatttatctttctaccgcctcgtatctgagcaccgggtgtctcgccgcttttgtttcatccattctttttacaatcgttgtatgcggggcctcctgaacaagttccggattctcctccgcttcttttgcgatttgaatcatagcatcaataaacgcgtccagtgtttcctttgattcggtctctgtcggctcgatcatgatgcattcttcaacattaagcgggaaataaatcgtcggcggatgatagccgaaatcaagcagccgttttgcaatatcaagcgtacgcactcccagctttttctgccgcttccctgataatacaaattcatgcttgcaatggcggtcaaacggaagatcgtaataaggcgcgagttttctcatcatataattggcgtttaacactgcgttctcagtaacagcctttaatccgtcaggccccatggagcgaatatacgtatacgctctcacattaatgccaaagttgccgtaatacggcttcacacggccgatcgcatgagggcggtcataatcaaacgtaaagcgcccttcttttttgactaaaactggctttggcaaataaggaatcagatcttgttttacgccgacagggcctgagccggggcctccgccgccatgagggcctgtgaatgttttatgcaggttgaggtgcaccacgtcaaatcccatatcaccaggtctcgccttgcttaaaacggcatttaaattagcgccgtcataatacagtttcccccccgcttggtgtacaatttccgccatctctgtaatctgctcctcaaacaagccgagcgtgttcggattcgtcagcataagagctgcagtttcttcattcactgctctttttaaatcctctaaatcaacaagccctttttcattcgatttcaccgtaacggtttcaaagcctgctactgttgctgatgcaggattcgtcccatgcgcggaatcagggacaatgaccttcgtccgcttgaaatccccgcgagcttcatgataggcacggatcatcatcagccccgtccattcgccgtgcgctccggcagcaggctgaagcgtaacctcatccattcccgttatttcttcaaggtgtttgcttaaatcatataaaagctctaatgcgccttgcaccgtgtcttcatcctgaagaggatgaatcgcagcaaaaccaggaatacgtgcgattttttcattgattttcggattatatttcatcgtgcaagaaccaagaggataaaaaccggaatccaccccgtgattgcgtttggacagcgctgtataatggcgcatgatgtccagctctgaaacctccggcagcgctgcgtcttcgtcacgaatataggtgtctgacaagaggtcccccaattcgatttccggtacatcgagctccggcagactatagccgattcggccttctcttgaaagttcaaaaataagtgcctggtcctgattactcatggcgatcccccaattcctgaatgagtgcgtcaatttcttcttttgttctcagctccgttacagcaatcagcatatggcagtccagctccggatacgtcaacccaagatcatatccgccaatcatgccttttgccagcaaacgcttgttcacagctctcaccggctcatccagtttgatgacaaattcattaaacatcggcccgtcaaacataacagtaaggcctgctttttttgcttcttgctttgcatagttggcttttaagagattttggcgggctatatcttttacgccgttttttccgagagcagtcatggccactgatgctgcaagcgcatttaaagcttggttcgagcatatatttgatgttgctttatcccggcggatatgctgctccctggcttgcagggtaagcacaaagcctctttttccgttttcgtcttccgtttgtccgacgagacggcccggcacctttctcattaattttttagtaacggcaaaaaagccgcaatgcgggccgccgtatgctgaaggaatgccgaaaggctgcgcatcaccgacgacgatatcagactgaaacttgcccggcggagtgagaagacctagcgccagcgggttagctgaaacaataaacatggatttcccttgatgagcgataggctcaatatcctttagcggctcgatcctgccgaaaaaattcgggtactgaacgatcactgcggctgtgttctcgcaaacggtttggcgcaatgcatcaagatccgtaacgccatccgcagcgggtacttcaacaacatcaatatactgaccttttgcgtacgttttcagcacctctcgcgattcaggatgcacggtttttgacacaacaatttttttctttttcgtgtggcctgaagcaagcattgctgcttctgccaaggctgttccgccgtcatacatcgaggagttggcgatatccatgcctgtcagttcacagatcatcgtttggaattcaaaaatagcctggagctctccttgtgaaatctctggctgataaggcgtatatgcggtataaaactcagagcgcgaaatgacatgatccacaatgacaggctgatagtggtcatatacacccgctcctaagaaagaagcgtattgtacggtatcacgatttttagaggccagctttgtcagttctcttgttaattctgtttctgatttcgcttttttgatttgatactcttttttatatttgacgttttccggtatatcagcaaataaatcatcgatgctgcttacgccgatagtagcaagcatctcctgtttatccttttctgttgcgggcaaataacggtgcttcatgtgttgtctcctctctccaagaaaaaatattagcgtttataaaatggtgttttgacaacctttgctttcactaattttttgcgaatctctacatctacaacagtcccgatctcacttgtttccgaatcaattaaggcaaggccgacgtttttccctaatgtcggtgactgcgtgccggttgtcacctttccgacagacttgccattttggaaaacctcatatccgtgccgcggtatccctttttcaatcatttcgagaccgacaagtttgcgcttcgctccgttttctttttgttcactcaatactgacttaccgaaaaagtcagactccttattgtgctttacagcaaagcctatacctgcttcaatcggtgtaatatcccgggtcagctcctgaccgtagagcgggagcttcgcttcaaaccggagtgtatcacgtgcaccaagaccgcatggaatcaatccgtatgcatcccctgcatcgatgatttttttccaaatatgcatagcatcatcactgcggcagtaaatttcatacccgtcttctcccgtatagccagtgcgtgaaataagtgctttgcggccgctgatatcggcttcatcaataaacgcaaacggctttaatgcagacacatctgcatctgtcagattttttaagaccgcttctgctttcggtccctgtacagccaagagcgcgatttgatctgactggttgtcaatctgtacatcacctgctgcatgttctttcatccaagccaagtctttatctatattagaagcattaatgacaagcagatagcggttctcttctttttgatagataagcaaatcatcgacggttccgccatccgggtaacacatcgctgtatattgagcacggcctggcgttaacgcggaaacatcatttgtcatcaatctttgcaaaaaagacagactgtcgttccctgacacttcgacttctcccatatgagatacatcaaacaaaccggctgcagttcggacagcctcgtgttctttttttatagaagaaaattgaacaggaagctcccagcctccaaaatcaatcgtttttcctccatattccttatacaggtcaaataacggcgttctgttcagcatctaattcctcccctttatcaacggcgcagctaaaaacatacaaaaaaggacagagaaacacctcatgtaaaatgaaggttctctgtcctggcacctgaaagtttactttgcatacgcaaagacgtcccctttggtggtttgcgcatccgcacaaacactctccagagttgcgtcgagcaagagttcttttgcctgagagattcactccgcagtttgctccttcggcgcctgtatcccgaggttttcggtcaggtctctccccttgctgtcattcgctcatattttcatgctgttatggacatactatagcaatatcttacatcaaatacatactcatatcctaccatcatcactatatgctgggcaacagcaatttgggcagatttttcttatattattcatcttaagaatcgaagaattagaaaggcggtttcaaagcaatgaatacagaaatgatctacgatgcaaaatggcctgaagaatttgctgaaagactgaaaaacgatggcccttgggcaaactgggaactgtacaagctctctgcagaaatccagaaaacattagcaattccagattttgaaggcttacgggctcctttatatctgccttcctttacgccgctcccccaccagcttgaagtggcgcaaaaagtggttgaaaaaatgaacgggaaagcgattttagcagatgaggttggtctcgggaaaacggtggaagccggtttaattttaaaagaatatatgattcgcggattagcaaaaaaaattttgatccttgtgcccgcttcccttgtgtcacagtgggtcaaagagcttcaggaaaaatttttgattccggctgttgaacaaaagaaaagctatgtgtgggagcaatgcgatattgtcgtctcatcaatagacaccgcgaagcgctcgccccatcgagaaatcgttctgtctatcccatatgatcttgtcattattgatgaggcacacaaactgaaaaatagcaaaacgaagaactatgaatttgtccggaatctcgtaaaaaaatattgcctgcttcttaccgcgacgccaatccagaaccgtatcgaagagattttcaatttggtgtccttattaaaacccggccatttaggcagtcagaatcactttcaggaggagttcgccaagaagaaatccagtttagaagcgcatgaacatttaaaagatcttgtgaataaagtcatgatccgtaacaggcggcatgatacagggctgaattggaaacagcgccatgttgaaacagtgccgattcaattttctccatcagagcaggcgctttatgatgaaatttctcgcttgaaggaaagtatcaataaaccagccagcatgttctcgattatgaccttgcaaagagaatgctgttcgagcagagaagcggtgtatatgacgctgaaaaagatgctagatcaaaaagagaaacaagcacctgccattgatgaggatacgatttcagttttaatagatcgcatcaatcaagtgacacaaaactctaaagcgcttcaagtcgttgatttgatcaaaaaaatcgacgataaggtcatcatttttacagaataccgtgcaacccagatttatttgcagtggtttcttcagcaaaacggcatcagttctgtgccgtttagaggcggatttaaacgtgggaaaaaagactggatgaaggatcttttccgcgggaaaatccaagtccttattgcaactgaagcaggcggtgagggaattaacctgcaattttgcaatcatatgatcaactatgacctgccatggaacccgatgcgacttgagcaaagaatcggaagaattcacagactcgggcaggagcgtgacgtgcatatttataacatggcgacaaaacatacggtggaagagcatattctaaagcttttatatgaaaaaattcatttgtttgaaaaagtggtcggtgaacttgatgatattttaacgaaaattcaagtgaacaattttgaagagcatctgcatgacattttgtatcactcagcaacagaagaagaaatgaaaataaaaatggataacttaacctcatttttgtcttataaaaaacagcagcctgctgaaaaaagaggatcttagcctgtaaggaggttttattagtgagacagcaagaggttcacgattttctgctgcgtttttttcaagcaaacagctgccaaatcgtcgatcaaggcttaggctatatgacagtgcagcttacagttgaaatggacaaacaaatcatgaaccgccctttctactggcattggcgcgagaagacaggcggtgatccgaatccaatgaaaatcacttttattacagataaagaaaatgcgccaaaagacctagatggtgaatttatatattttggggccccgcgtctttttcaaatatttaaagctgttaaacaaaatgggagatttaccagaatgtatgagaaaattgaatcagccggagctaaagtcccacttcagccttggcttggtataaatgtcacgatttcataccagtccgacatgaaaaaggataagttattgtcactaggtcttcacctagtctctggaacgataattgaagattttcaaagcaagctgacccagttttcactgacgtctcaaatatgtgactattgcttcaccatttcacctatgatcaaaccagaaagcggacttaagcgtatggaaaactatatttccaaatccgctatgcaggagccatccgactgggcggaacaggcggttaacaggtggaagaatgatatgacattgcttgataagttttacgagcatatagaagaaaaaccagaagaataccatctagaaaaacaggcgctgaaaaccttgtatcaaccaaagatatcagttgaaattgaaaatggcggattgttttatctgcaaaataatatttcaagctaacttttttaccattcgacatcattctcgttttttttgagaaaatacgattataataaaggtatattggaaaaaaattctggtgatttaatggcaaatgacttccagagactaatgaagcatacaataagtcatggccggactggctgaaatacataaacaagtattttaggaggagaaactgcatgaagaatgcaaaacaagagcactttgaattggatcaagaatgggttgaattaatggtggaagccaaagaggcaaatatcagcccggaagaaatacgaaaatatttacttttaaacaaaaagtctgctcatcctggtccggcagccagaagtcataccgtaaatcctttctgaatgtgctataatatcacaaggaaggtgatgacattgattggccagcgtattaaacaataccgtaaagaaaaaggctactcactatcagaactagctgaaaaagctggggtagcgaagtcttatttaagctcaatagaacgaaatctacaaacgaacccctccattcaatttctcgaaaaagtctccgctgttctggacgtctcggttcatactttgctcgatgagaaacatgaaaccgaatacgatggtcaattagatagtgaatgggagaaattggttcgcgatgcgatgacatccggggtatcgaaaaaacaatttcgtgaatttttagattatcaaaaatggagaaaatcccaaaaagaggagtagtgcctgagcagaggcactaactcctcttttgtcaataaccatcgagacggcccagtatatgaatactgggccgtctctttttatggctgttattaatttttatcctcgctgtgcgctttttcattttctttcacataaccgtctttatcagtatggtcctttttgattgtcaagccgttccactgtgtagcttcgaacgagaattgaagcttaatggagttgccttgatatttattttgaaccataagcccgttttcatcttttgttttatcatctttgaattggatttccatttgaacctgatcgaagtcagttggtgtttttggaacaccatcatattcaggagcggttttaccgtcaattgttgctacattgactttaccgcttgcatttaagaatttagggtcaatttgttttttgattttttcagtagccgctgcatcatttttagcagacatcaaatacaagtctttaaggttcgcatcatctaaaataatgtttttcgggtaaccattgccgccctcttttccaactgtcaacaatgtcacttcaaactggctgaggaaatcttctggagatgtattgctgccgccgtttgctttaaaatctccataattaagcgccattaaaacttctttgatcgcaagtgatccgttattttcaaattggaaatcctttgtcaacttatctcccggctttagatttgataagttcacactcgctgaattctctttagcagataaatcaagcgtacctgatgcaaaagtagcatcctttgatttaatgtcgttaaatgctgcccatgttcctcctccaactaaagctaatcctagtgctgcagaagcaactcctaaactcaatttctttttcatacccatggtaaactccccttttattgaatgattttatatcgaaacctgttgccaggtttacaactgaagttaagtagacatggtgctgtcctttgtatctgtttccaaggcttttgtctttctttcaatttctctaatggcgctgctgatcgtcacaaaagcgtacactaacagcatcacgccgggaacaatcaataatacagccgttccaatcggctggctggcaaaatgaagcatatagcctgcatatggaagctgaaaacctgtgtattgtgcgcgaacattttcgtccgatacaggcgctgaatcagctgctgcattattatcaccttttgttttaaataacaaatggtctccttgctttgttatgtcaacaattctgtgggtgacagccgtatttgcatcctgcataaatgtaataacgtcacctttttgaagctctttcacatcagcgatttcttttaccaatattaaggaacctgtattgaactccggctccatcgaacctgacagaactgatttcagcgtatacccaaacaccgccggctctcccccggatgaacgtgttgaaatcacgacaagtgtcagcacaataataagagtaaagatgatcacgtataaaatattactgatcagcttcattgcttttttcatcctcttccccgctttccttctggtctgattgagtttcattttctttggttacagcttcttgagatgtttcttctttcattgttttttcctgtatatccttttgtgttgtttcattctcctttttgacgtccgactttgtttcttttttagggactgtcggtttttcatcgcattttgcaagcgtcataggctcggaccactcaaatgtactgccgtttgccgggtagcctgccggtttatatactttaaatgcataaatgccgggtttcatttttttcttcgtctcaattttataaagtgaatcgccgatttgattggagacaaatcctttttcgatcacgttcccatcctttaacggtttgcgggcattttcaagcttatgaagctcccacttccactttgatttcttaagtttctcacctgtattttcgagcacagcaaataaggcgaaaggtgagcatacagtgcctttcgtatccgtttgatctgatatgtgcaaatcactttgatcccagcgtttatcataatggcagtttttatctgtatgctgaaagtctttacacgtttgaagtgagacatcaaatgtttcaatatcatgaaaagcagcgcttgtatcatcggaaaattgtaagcatattgcggcagtcagactgaaaatgactgaaagctgaaagataagcagaactttcagtttcgtcttcgccttttgctgattgtgaaacaatcgaaacatatcttacctcctgtaaaacactgtaacttgatatgacaatcgttctctttaaagaactccacaaatagagtataatcaacgatttatagatttaaaaacaccgaaatcgctcatttcgttcgtttaaaagaatgttttcatcatattacaaagtcttgctcagtattgctcattttttcaattttttagaaatttttgggattgttatgtgagaatttaaatgcatatcccattattatttggtaataataaacaaagaaagggtgacagcatgatgatcaaacaatatgtgatttgtctatctcttctcgtctttggcaccacagccgctcacgcagaagaaacaccgcttgtaaccgcccgccacatgtccaaatgggaagagattgctgtaaaagaagcaaaaaaaaggtacccgctcgcacaggtactgttcaaacaaaaagtatgggaccgtaaaagaaaagatgaagcagtgaagcaataccatttaactctgagggaagggtcaaaagaattcggcgtttttgtaacgatttcatttgatccttatagccaaaaggtcaataaaattgccatattagaagaatatcaataaggtcctccattttttgaaggaccttattcatttatttgcggttattttttccgtttcagccaaagtcggaagccatagggtaaaataccgaaccactgctgggaagcaggcgtttttgtttctttccacacctcttttcgttcttttcgctcatctctcggagtatctatatatttgacaaattgctgcgtcatatatttaacataatcattcgttttcacgtgatcacctcatcattcaattattatgagtgttgtctcacatgactttttttataccctttacactgttttattctgtccatctcagcagctttttctgtttttggtcaaacacgatctgtgcagttctttctgttcccgactccgttgacactcttaagttgatttctttttgttcttttatcgatgtatcatgaatgtaataagaaacccgtccatatggaaattgctgcgtaccctcctggcctttccgttcctctagaacatgccgaatcgaaagaagcaccccattttgaagcaaattctctcctatgtataactcttttgtttccttctcaaacatgcagcgtgaaatatattgagcagcagcaaagttcacgattaacagcacaagcgctgacacaaaaagaacagctgggtaaataaaccctcttgtacaatacattcacccccctcctaaatacgaatagactggaaaagcagtttgatacactttttggtcctcactctcaattttcagcaaaacaacacaattttcaaaatcagctttcatggcagtaatatgatctaaaatcggaacatgccctttaccatccactctttttcttatcattgaatgataaatttcgaaacggatgtcctgcccggaaagattggtgcagattaacacgctcccatgctcggctgtcttaactgcctgtgactccttgcattcattcatcatctgttctatcgaaatcatccattcttgctgtgtgaaaccgtcatgttcctgctgtcgagacaaaaacagatggaaaatcgcagctaacgatcctgatatgagcaaaaagactgagagcgaaaataatacgttaagaagcgtatagccattctgtctgcaggatgctgaggcaatatgatttctctttataagctgtggctttgatacatacgttttgatattcgccctcctcctcccacttcattgcatagatatgattgttctttgtaattgtttttgacgcggctccttcaccactcatgacatatttgctaatgctctcattcatcatctgatagccgatttctcgtgattccgccattttttcatcagctatcagcttgtcccacaaggggacgactgtcagcagcacaaacagccacaggcttagcgcagacattgtttctattgtagaaaaacctttattttctctccacattgactctcccgctccctagataaactgttatatcatatacggcatggccatttactcgtatttttccgcctgcattcgggtgccctttctcattaaattccaaacggtcttttaatgtcagcagttctatagaaagtccccttgcatacggacgttcaatgaccgtatcaccaatgactaattgatattcttttttatgaaagaaaatttttgttctttgttgacgggaaatagcaacctgctgtgtgagcataatatcatttttcagctgccttgctgcctgtcggacagctgtattgtcataagcaggaggaagtgtagtgaagacggccaccaggaggatagaggcaaggcttaacacaagcaaactttctaaaagggtaaacccctcctcctcgtttaatttaatgttcaaccttaacttctccgccggtgatgataatgcgcttaccatttggacagacagcatcgtttttcacatagccctctgactgtaaatcggcaaggctcggagtttgtccttcatgatcaagctcaaatgcagtcatttgtgccttaaccatgttttgtaagccttcacagccctttttttgaatggtttggttatgtttcgtgacgttcggtatcgtaattaaaagcaaaatcgaaataataaagagcacgattaacatttcaacaagtgtaaatcctttctcattcattagcctcttcctttcacatttgattcatcatctgatacataggcacaagcatagataaatacacaagtaagatcatcgctgcaacaaatccataaatcattggctgaaggatgcctgtccatttttgcgctttgtgttccagccgctgtaatatgaattggctgtatgtgaaaagctcccgatccaatcggccgctcagctggccgtgagatatgacttttgataaatcagtttcataaaaagggcttccacaaatagcggattcaattgactcaccggcttttagccgttcaatcaattgttcagcctcgcagcggtagaaagggagaaacgtttgatgtttaaatgcattaaggctgtcataaattgagaggcctgattttaaaaggctgcttagctgcaaagaaaaaaagtagctgttaaacagcttgacaagctttccaaccaaaggaatcctgatacaaatcagcatttgccgggcaggtgattttttcttaaacacaagccaataataaatcccgatacctgctgtaaaaagaacaagcaaaatgatcacaagatcaatatgctgaaaaaaagcaaaaagtatatcggttgaacgtgaggtttccatattcatcgattgatagataccggaaaactgaggaatgatgatggactgtaacatataaaacatgacagcgaccgtaaagatgaggaaaagcggatagcgcagcactcttttcagctggtctgcctgtgcaatttttcgttccagcagctctccgctctggatcatggaagcaggcagttcaccatgtgtttcagcaaaataacaaatacctacggcttccttatgaaatgacaaactctttagtacttgataaaacggagccccttccctcaaacaagtgaccgaatcagtcaagtcagccgcctgcctcttattcatctgaagttccatcaggcgtaatccatccagaagcgtatatccgcccgcagtcatttcaccgagcctctttaataacctcgcttgatcctttaacgaccagacttttctaatctttttcatgataaacccaccggtcatagttgtttgtcgttaaatagccgagcgcaattccttttctgataatttgacgaagcgtttgatattggtaatttgcatgatttccttttgcctcctggatacattgctgaagatttttcccgtatagaagctcataaacgctagctctcctggtatttcgtgactgtcggcaatacactgatgaacatccgttttcacaaaacgggcaagccaaatcaaccaagcgctgagccgctattgcaatgacagtctgttcgatttcattcatattgataccgaattcaagcagtctgtaaattgcgccctttgcgtctctcgtatgaaggctcgttagtaccagatgtcccgtcatcgctgcccgcaccgcaatttcagctgtttccgcgtctctgatctcacctaaaataatcatatcggggtcatggcgcaaaattgctttcagacctgcggaataagttacaccggctttttcattcacctgaacctgaagaacatcttcgtcccttgtttcaacagggtcctctaatgtgacaatatttcgattaaagtgtttttttgcatattgaacgagagagtatagtgtggtagtcttccctgaaccagttggcccggtaaaaatgagcatgccatgggaatgttttaaaaacgagagtaatgtggctcctgtcttcggaaatagcgacaatttatcaatcgaagggatattgtattggggcatcactctgatcacgaggctttcttcattaattgtgggcagcgttgacattcttaaatgaacatttccctctttcagctttaacgtaagcgaaccgttttgcggctttcgcctttcacctatatccattgctgaaagaaatttaaaatgtgaaatcagccttacgcactcttcttttttcatgtccctttttttcagcaaggcatgatcgacccgaaaatgaatgatagcgtcccgctccctcggcacaatgtgaatatcagaagcctttgttagatatgcctcttcaatcaagtttttgcttaccttttctattgaatccaatttgattccctctcctttcaacgcatattgtagaaaaagaagaaagggtaatcaaacaaggaaaacgtgattttgtgagatgttatatgctgaaaaaccaattctttctggcaagaaaaaaaattttcaactgaatgtgccgctgtcattataattttccctataaataaaaaagcagacatggtcaccatgcctgcttgattccattttcattatgctgttttcgctttttgaccagtatctttttcaacggaaaggtcgcctaatgcaacaataccggtcatttggtcattttcaagaatcgataaactgcggatttgatgctctgccataagcgccttgacatcgtatccggtcaccctgatatgtctggtgaaaaagcggggcacgctgcacaaaatatgaaacatcctatagagtccgcctttttcgaggtttctttttcttcttccgctcctgcagcatatctcccgtccagccttttttcctcaaatagagatagatcaggactgtagatgtgacaatcaataagagagaaaagagatatccgtatttccaattcagttccggcatcactgaaaagttcatcccccataaggcacccagagctgtaatcggcgtaaaaagcgtcgtgaaaatggtcagtgcttttacaatttcattccccctgtgtgaggtaatgacttcctctgaatgcagcagattgttaagctccccttcaaattcgctgatgtatgtaaatcccctgtcaattttcagttgtgtccgctgataatcctttttcccttcattttgaggtaaaaaggtttctttcaacgccatttcaatttttttggcgcttaatattaaatttttccaaatcatcagttcatggcgcaggagatggacgcggtttagaatgcttttgctattgtcgtctttaatttgccatctgagctttctcagctttacttcaaattcatcaacaccgattaaatacgcattcattagttcgccgagaagaattaaaaacccctctatcgcattgtccgctctttccatttgccggacaacttctttgcctttaatctctctcaaaatcgaaaagtcaaaattgattgtgaaaaaatattgtctggtgatataaaagtgaaaaacagtatggtctttttcttcaccaagcccctgatcataaacaatcgacccaaataccgcttcattttccgtttcagttgtatctactcgcaaaaaattaacgtgatggttattttcaaaccacttttcacactgaggccagtgagaaaaatggattagatctcttgccttacttctttcttgaggccccatttggtaccaaaaccaatcctttcctgtatgtgccttcatgtcaagatcctccaaacttttgttctttattctttaattgcccaataaccgcgtcactaaaccagtctgccgcttcaacacatgttttatgagcattttcaggtggtatggaatgtagaaagacatcggaaaagggaggtgcatgccttccttggagaaggcagttgttttggaatttatcaatttactagcagtcgctattctcattttgttaacaggattttttgttgccgtagaattttcaatcgtaaaagtgcggcgatccaaaattgatcagcttgtcgcaaaaggaaagaaaggttctaaagcggcaaagcatgtcatcactcaccttgatgaatatttatcagcctgtcagctgggcatcacagtcgcagctttaggactgggatggcttggggaaccgactgtgcaaactctgcttcgaccgctttttcataaagcaggcttaaatgaatcgcttacccacctgctttcactcgtcatcgcatttttagtggttacgtatttaaatgtcgttattggggagctggctccaaagagtttcgccattcaaaaagcagaaagcattaccttgttgttcgctaaaccgcttatttggttttataagatcatgtttccattcatttggctgttgaaccactctgcccgattgattacaggagtgtttggactgaagccggcatcagagcacgagctggcatatacagaggaagaacttcgggtcctattggctgaaagctataaaagcggcgagattagaaaaagtgaattaaagtacatgaataatatcttcacctttgataaacgaatggcaaaggaaattatggtgccgcgaaatgaaatggttagtttatcactagatgaagactccatttcaaatcttcaggaaacagtcaagcaaacaaaatatacacggtacccagttgtaagagaggataaagataacgttattggcgtgattaatatgaaagaagtgctgttttccatgctgacgaaagatttttcaatcaagaagcatcaaattgaacctttcgtacagcccgttatccatgtcattgagacgattcctatttataaactactgctgaaaatgcaaaaggaacgcactcatatggcgatcctcatcgatgaatatggcgggacgtccggtttggtcactgtcgaagatattatcgaggaaattgtaggagaaatccgtgatgaatttgatgcggatgaagtgcctcatatccgcgaacttggaaaggatcattacttgttaaatgcaaaattattaatcagcgatgttaacagcctgcttggaactgatttatcagacgctgaagtagacaccttgggcggctggtttttgacacaaaacatagacgctgagcctgaaagtaccatagaatatgatggctactcttttaaggtaaaagacatcaacagccatcacattttatttatagaagtaaaaaaagctgaatagcccgtgaaaggctgttcagctgctatctttcaagataaacatggcaaaggcatcaacactcttttattttaaaccctttattggccagggctttagcaagactttgctcggttttcacattcgaaaaatccagacccagcttcacgacagtttgggcaatttccggcctgattcctgaaataatcgtctcaatgccgagcaatttggtgctgtcaatcactttaaaaatttgataggctaccatggtatcaacgataggaacgcccgaaatatctaaaaataaatacgagagctttaacgctgagcactgctccagcacagactccaaaatcgtcctcgctctgtgcgtatcaatttcaccgacaagcggaagaatcccaattccatcagtaatcggcataatcggcgcactcaattcattaatcatttctttttgcgcgtttaattgtatcatggtcacctggtgatattcttccgtaaacacttcgatgatctcatcaatgttttgattcaagatccggctccactcataaaattcctgaatgctgatgtcttgagaagaagcttcgctgaatttatgaatccattcaaacatgatgtgcctgaaagtgttaaactggccgacactttgtgtaaccgtcacttcatgaacggcacggtctctggcgcattgaagagaccaccggttgagctcatcctctacgtcttcttttctaagggattttgctacgatggtcaccaataattcatgctggtcttttaacttttgttctagtttttgctgatctttcgctgaatacagccagctgcctgttgatgtacaaactttcagccattgttgcgtgatatcttctttgtgctctgttaagtgctgatcaagagctatcatcttaatgagctacctcctgtttttgaaaaatgtacgctatatatgtataacgcgtctgcctttacacatactatgtttagattcaatgggctatagccaagcggtaaggcaatggactttgactccgtgatcgttggttcgaatccagctagcccagtttctgaacaggtgaaaaaccgaagacaagctgattcgaataaatcagcggatcttcggtttttcatcatgcagattgatgaaccgttttcttcttcgataacttcaacagttctcccgggttataaccaatcaccagctttttgttgtctactagaatcgggcgtcgcaaaagcttcggcttctcgattaaaagttccagcacctcatttaccgtcatttcttcaatgtttaaatttaaatttttgaaagtctggcttcttgtcgccaaaatttcatcaattccttctgtcgttaacgataaaatgtactttaattcttctcttgtcggggtttctctgaataagtgccgttcgttaaattcaatttgatgtgctttaagccaatgttttgtttttcggcatgacgtgcagcttggatatgagtaaaaagttaattgttgttccattcgttttttcctcctcagttaaccatctctttgtagaataactacccggatcatttttcatttaaaccatttacagaacttttttcggattatttttttaaaaacattcatacaatagaaaacacaatcaaagggacaaattccatttgtatattaataatgaaaatgtttacatttctaggtgtgatccattataataacagtcagagggactctcgggaggggataaaaatgaatcgcatgttccgggtgttaggattttggacgggaatttttgcagtcatgttttatttaggtgatatgaaagatgcttcccttttattttttggacagacgatcttatttgtgtttctatcgtatttgaacttaaccgaacgcatgtatatttatatttttggcgcttatttaacaattttcttcgccggctttacatattactcaatttttattatggtgcccggcggcggaggccattaaatgcagaaagagacaaaccttatcggtttgtctctttttttacaatgaaaacccatttaaaaacggattttggtcctgctcagtcagtacgtctgtttcaggtccatggccgcttaacaccagcgtgtgttccggaagtgtaagcagtttttcatgaatggacgtcagcagcgtctcttgattgccgcctattaaatccgtacgtcctataccgccttggaacaagacatctccggagataaccaagtctgcatctttcacgtagtaagacacactgcctggtgaatgtcccggcgtaaataatgtttccaaatgaaacggcccgatattcaactcaccgtcgccttcaattagatgatctgcaggcttagctgttacttctatccctcgcagcatgccggagccgtttaaagaagcgtccgtaagccaatttttttcattttgatgcaggtaaacagggatatcccatttttctctcacttcatcaagcgccccaatatggtcaaaatgggcatgtgtaagcaaaatggctaaaggcgtcagccctttttcttttatgtattgattgattttatgtccctcgccgcccggatcaaaaatcaggcattgatcatcattgatgagaaaatatgcgttcgcttgaatcggccctactggcattcgtctccatttcactattatcacctctttcttttttatgctcttattatgagggttttttaaaaaagattcaaacaatcgcaatgaaaacgctatcgacaaacctataaaaaacaggtagaataaaactggaaagaattgcaggtttttcaatgtaaagggggctgtgttatgttacttgtcgtgattttcggccttgtcgctcttttcgctttatggggagtcttgcgttctgttagaaataaaaatatactcgggtttttattagccggtgccaccttatttgtctttggatggtttaccgtgatgaccgtaataaacagcgggtatccaaccgcacattaaaacctgtatccgatcggatacaggtttatttttatggctgtaaatgtttattgacactttctattttgctctcaagcgtcgtttttttgtcacgcctgtcatcgatacggatattcgttgccactctgtgcaatcctttttgaaatggcgcttcgtgaattgcctgaatgactgcaaaaaggtcactgagttctccctcgatcagcgtattcatcggtgtcagctgatatttgattttcccttctgcttgatatccttctaatatcttttgcacatcggctacgtaagcactgacactgggtgtttccgtaccgattgggataatggttacatctgcgatagccatcgttattccatctccttttgatcaatgatgagttgcttcgtttcatgtgatttcaataaaataatttgctcaaaatgaaagccgtataacgcatatttcccgttcggagatatttgaatcggctccatttcccgcagagacacaagatcttttgtctctcccgatgctacattgattgctgcgagcttatatgcatcgccgctttgtttgaatgtataaaacaggcttcctgcttcatcatagtcatactccattggagccaaacttgtatatttcgcttggagcggccatttcgctgtaacaggtgatgttgattgcggcgttttaaactgatacgtcccttttcctccggaagctgatttgacagtaaaactcatttgatggaaagaatcgaagaatagaacgttatcctcaagcttctgttccgtcttagaagctgtatcgaacgtatataaaggccctgttttatcgtctcttccctcttttacataatcaaatgtatttttggatgtccaatgaatgaacggaacctgtactgggcttaagaaagattcgtcttttttagcattcacctgatatgtatggaaatcccagttttcattgaattccgtcaccatcatttgataaggatcatactgattccaagcagcttcaagctcatacgtttcgtaatctttttcgtaaagcgtctctccttctgcattaagcaaaaccactgccgtcttttggctatgtgtgatttgcagcagaatcatctgctccctcgcattgatttgaacatcaacgatttgaccatccgtttgatagagctttttcgctttgcctgtaaagatgcggtacgcaaaaagctctgttttcgtcggattagacgcagtatataatattgtgctgttattcagccagccttccaccccatccgctttttccgcggaaagcggtatgatgtcttttttctcatcttttgccgccgatgcctgtttttgctgctgatgagatggttcgcatgccgataaactaaacagcaataccgccagcagaataaaacaaactgatctcatcagcattcccctccgatcatctttattctctcatatttgcttcggcagaaaaaagaaaaagtttcagttactcatgaaaaaataacgccctccacaagataccgcttgtggcgttatatatgtgtgaaaactgctgaaacggcaaaggattttggccttttccaagttccaccgtatacccttccttaaaataatggtgaataaaccagtcacgaaatccagcatagctatctatatcccttactcccttataaatgttcccgcttaactcctcaaaatcctttatgacggcagcagattcctcaggctcaaggcctttatagccccaataaatttcttctccttgagtatgaagagccagcagtctgtcaggcggattctccgtgatcagccggtacatcgcaatagattccggctccgtaagcggagagattcccggaaaatcgcggtagctgggtgctgtcggttttcggtatttttcaatttcccataatgatggaaattgtttatttaaatcaaccccgtttatattcgccttccattcattaaaatttggacgatgttcatttagcctttcgagttcatctcttctggctcccatgacttctgatccgtttaaaacaagatcaacgccatccggattgacaagaggaacgagggataaggatgtgctgttaaacagctttatgggagaaaagccaaagaaaggcgaattgcagcataatgacatacagtattccttaaaccattttagcaggacagacgttgtaatccactcattcgcatgaaatgacgcgttcatatggaccttttttacggcatgctccccaccagccttcagctcccagataggcctgccgagtacagaacggccaatttcccggcatgagacaaacggaaaaacatcaataatcttctttatttccttttcaacagctgaatcatcatagattttctcttgctcaatccagctatctgaaagtttcagctgccgaggctgtaaaaagcgctttatgtcctgaatggtttgaagctctttgccgctatgctcctctatcacataaccagggcaatacaattgatgtttttgtgcggagcgatttgcacttttaagcaattcctcgtctatcttcagttctttcgccacattggccaaattgttcttgatctcaggtttcacagtaataaacgccatcatcatcccccttttttgttactatatgacagcgtatttaaaaaaagaaagcctcccgctcacttcaatgcgggagacattgtgattatgatgcctgatcaagcatttgtttttctttccgctttgacgaattgtccagccttttctggtcataaaatcgcaacaaatccccataaatgatttcatcagaaagtgatagctcctgttttgctttatcagcaaatgcttcacattgttttgtctcttctaacggttttcccgtctctttgtcataacacgcaccgtctgtataaacaacctgatctgtgataaagctcccgtcccggagcaccgtgaagtccagtttttcgtctgaaagcagatcgttgccgaattgaatttgatctttcgtatcaatccctaaaagattcatcagcgtcggcctgatatcaatctgcccgcctactgtttcaatggtttgcggctttttatcagtaatacccggaatatgaatgaccagcggcactttttggagctgtacctcttcaaatggggttatttcttttcctaaaaactgccccatcgcttcattatggttttctgatataccataatggtcaccatataatacaataacagagttgtcgtataacccgtcttccttcagcttttcgataaaccgtttcagcgcctcatcctgataacgcactgtcggaaaatatttatttagcgtctggctgcttgaatcatattcatcaatcaattggtcctcttcatcaagatcaaacgggaagtggttcgtcagtgtaatcagcctcgagtaaaacggctgaggcagatttttcatcagctctgaagactgctcaaaaaattctttatccttaagtccccagccgactgaattttcgtcagttacatcatacgagttaatatcaaaaaacgaatcatatccaaatgagtcgtacattaaatcacgattccaaaagctcttattattagcgtggagcaccgctgaatagtatccgctgtttttcaaaatttcaggagcggccatatattgattgcccgcattcgtaaaaaatacggcacctcgtccaagcggatacagtgaattgtccacgataaattcagaatccgaggttttcccctggcctgtttggtggtaaacattattaaagttgtagctctgttttataaagtcattcagaaaaggcgtgatttcttctccattcaatttttcattaatcacgaagctttgcgtcgactctaaggatacgagaatgacgttccttccttttgcagcgccgaataagcgtttgttggcatccttcacattagcggttacgtagttttcaatctccgtcaggctgttgctgtctgccaacgctctctgtgcggattgctttgactgaagaacgccatcgtaaatatgaaaattaaacaggctaatgtttttaacaagcatttctctgtcaaatgagcgtgtcaatagctgaggtctttccgcctcagacaagcccaggttgaagaaataaacagaagcaacgaacaaaaaataagccgcccgttcatttttcgttgagggaatgtccgattgaaaagctttttgccggatgtgaagccatattaaaaccgcaatatctacagctaataggaggtctgtcggctcaagaagtgttccgatgctgcttccgagatcacccatattgctcgtttgaaaaagaacagggattgttaagaaatcattgtaaaaacggtaaaaaaccatatttgccagcaatacaaacgtgacaagacagctcatcgcgataatgtagcgatttctgtttttgccttttaaaaacaggctgaggccaaaaataagcaacaaaaaactcaatgggttgataaacagaataaattcctgtgttagattgtcgattttaatatgaaaactggttttgtaaacagcatacgttttcagccacatcaataaaatggcaatcagcataaatgaaatcttcgaaaaaaacgtttttcgcatttcaacctcctatgcagcacgctcaaaaaaatcagtctattcccaacattctcattaacacatcaaattaaatcttaacctgagcacaacaaaaaatcaatttcatttacacaattttaacaattttgatgtttcagccattcatttttagcgatccaagcgcctccgataacgccggcatcatttccaagtgctgcgattgaaatatcagcagcttgggctgcccgcggaaacgcgcatttgcggaatgttttctcgacttttgatctcagcagttctccggctctcgatacgccgccgccaagaacgattttggatggattaagcgagcttgccaaatttccgagcaccaaaccaagatgcttggctacataatcaaccacctcaagggcaatttcatcattttcacccgccgcttcaaacacatcccgcgctgacaattgttcggttgcttttaaacgtgtcgtctttttagcatttgctattttttcttttgcaattcttacaattccggttgctgacgcaattgtttcgatacagcccgttttgccgcagttgcagggcgctccgccttcagggatgctgcaaatatggccgatttctccgccggcgccatttataccatgtacaatttcaccatttgcaatgatgccgccgccaactcctgtgccaagcgtcacgagaatgacgtcttttgcgccatcacccgctcccttccacatttccccgagcgcagcaatattcgcgtcattttctataacagctgggatgccggtttctgtctccagatggtttttcaaagcataatttttccaccctagatttactgtttcataaaccactcctgccgccatatctacagggcctggtgcacccattccgatgtatttgatgatgtgcttcggtttttgcagctcatccagcttgctgtcgattgtttttgcaattgtgacagtaatcgtgtcgccggttttatcagtcggaacttcccacttatgctgaatttcgccatattgattaataaaagcgagtttaatcgtcgttcctcccaggtcaatgcccgcaaaccatatctcgtccatttttatcaccttagcctttataaaaatctcttccgttttttgtttgttccaattcttttcgaaggacagctgccgctctggcccactgctccttttcaatcatgtggttcatgtataattcctttaattcatccagcataaactcaatttcaagctctctgtctccaaaataaacaatgtggccaaacgtttttaacagctgctgcacatcataaaatgtattcattttcctcaccatttcttgaacttaactatcataagcgtattcataaggaagcggtcagtcaagaagaaaacgctgacaaaaaagccagcttcctttccatattccacctctatgattctttattgttttcaatttgccgctgcagctccttgtagcgctgctccttcggcttcagtttcacagccgtctggatggccttttctgcttgtgcaagctcatttttttccgcatacaataacgctaaattgtaataggaagcatggtctttaggttcttttttcactgctcgttccaaaagggaaaccgcctgatcatattcgccgatttgaatatcagaaacagcaagaattttcaaaagatcggcagaggcatctttttgcgctgcttctccgttcagcaattctgttacttcttcatactttccttcctgatacagctcgcttgcctgctgaatcagcgctgactcctggtgtgaaggcgaatgcaatccgtaatataaaaatccaacagccaaagcaatcagcaaaaccgctgacaacaatctttttccaaaggctccggctttaggcaaccccagtgctgctgcagcgaaaaagccgccaatcaagccgccgatatgtcctgaattatcaatattcgaaaccgcaaaaccaaagcccagattgatgataataatgacaataatattggttcctatagttcttaaaaacatttttcgattagacaaagcaacatacagtaatgcacctaagcatccgaatatggctcctgatgcccctgccgaaggatacgggctgaacacaaaactcgcaatcgaacccgtaatgccagcagccagataaatcagcaaaaatctccccgatccatacatccgctcaaccgctgtaccaaccgaccataaagccagcgtattaaaagctaaatgcgctatgccgatgtgaagcacgatcggtgtcagaagccgccaccattctccttgtgcaatcaggctgttttcttttgctccaaaagccaccagtgtctccgtattagtgctgcctccgtttatttcgagcaagaaaaacatcaggatctgaagcgcaataaataaatatgtaaaagtcggttttccgttttgaaaaaccgccgcttcagtttttctctgttcttcttgtttcagcactagcgaaaggaagcgttctcgcgccatttgcgcgttttcaaacgaagcgtgttcctctgaacaatcttctgtacgaaatgatggaaaaaccgcttgaagatcatctcgaagcatcgttcctctaacgatcgccggctcaactgacacagttcccttctcaaaagttttttttgcaatctcttcccagtcatcaacaggggcttccgttgaaaaaaacacattcagcagcttcatccttcgtctgcccaattgatgtctgactcgttctactcgttcggcctgctcttcgatgtctctaaccatttcttgacggaaatcaagatcgtgcttataaagacgaactagatcatgagaggacttgtccggcgcttccagccatatttcatctgactcaccggcttgtatgacgccatacccgctattcaccaggtgcgccgcaattttccaatatgtatactccagcaaaaacatgtttaccgctccaatagtttttttttcattataacagctggcgctccgaaacgcctactgaaagcaaaaaatcccgtttttcacgggattttagaaagcttgctgtataaacttattgcggataaatggaattcttaaaaacaaatggataaaagaccgcctgattcctggctggctgagtacagtattcataagacggtagcgattttgataaaacatgacggcagaaaccgcgaaaatggcatatatcaaaagttttttcatgatatccctcctgccaatagggtttgttattctgccttatttattctcgaataagggacaggaaagttatgaaaaacaagaaataatccgatcctctgttatcagcttatgtaccgggatgtcatgcggcaaacggggtacgtgcgcaaacagctggcactccaaaagcaaagagactgtctccccttcatattcacttaaatagcgatcataatagccgcctccaaagccgaccctaaacccgttaacatcaaaacaaacacctggaacgatcaccaagtcaatttgtgatgggtttacttcttttgttttttcaattaccggctcgagcagtccggcgtaaacggtttcgagctgatcatcggtcttatatgtccgaaattgcattttcttcgtgtccggatggcattttgggatgcaaacttgtttcccttcttcccaagcctgctcaatgacaggacgcgtcggtatctctaatcctctggagatggtgaccgcaatggtgccggcattttgccactccggcagagaaaacaagtacttatacatacgttccgttttttgaagcagatcttcatttgataaagcagacagtgcctccagcgtcttttttcttaattgtgatttcatctctcatccccctcggaatagaaaaaaagccagaacctttttcaaagctctggcttttttcttacacctcaaacagcaaagctgttattttgtttcacggtgtaacgtagattttttatcacgtgggcaatattttttaaattcaacgcggtctggattgttgcgtttgttctttttagaaatatagttacgctcaccacattcagtgcaagccaaagtaatattaacgcgcattattttccctccaaactaaaatcatttacttattcagacttatatataataccactataatggacggaatgctaggctgtttttcaatgaattgctgaattattgaagatacgctcataaagctgcaaatatgatgacataatgagtcgggggtggtggagcttgaacacttgttgtctgccagcttcttttatccggcgggctttttcccggtcttttaaaaagctgtccagcagatcagccgcttcctgtacgagcgtaaaattagcgatgattgccgttttgtcatgaacggcataatcacaaaaaccacccgactgagaaacgacagtcagcacaccttgttccatgctttcttgcgcggcaagcccaaacggttcataagaactagggaaaacagccatttcacattgagacagtaacgttctgatgtctttcctattgagaaacggcaggaacatgacgcgatccttcaggttatatgccgcagctaatttctcatagcaggacagagacggcccctccccagccagcactagatagaggtctggctgacgctgcttcaagatggcaaacacctttaacagctgcgaaaatcctttttccggaacgaaccttccatatgaaaagagaaatcttctatttatgcttctttggattttccccttctcttcctccatagatgcagggcttgggataacggttatttttttatgtgctgccttattaagagaccgcttcataaatgtgcttaatacgatcaatgcatcagcggattctataaggagccgttcggtcttgagcctgtatgggtgtggggcttctcggcacaccttcttcctttctctttcaagaccgtggattgtcgcagtaagcggaaggccaagccgttgtttcaaatactgggcagcaggggcagttgtgtcatcatgggcatgaatcagatcaaagcgtttattgtgtgataacacatggcgaaccattgtaaagttagcatcagctatgtaatcttcaaacttcgcatacgaaaacagctgcccgctcggagtaaaaaccgtaatgttgatatgagggtttaaataggaaatgaggcggtttaaatggacacctagcccgcttttcggctcatcgggatgttcgggtgaaagcatgagaatgttcaccgttctctctcccctctcccataacaggtgtatgcagaaaattgctcctcccacctggtgtgcgcttcctcaatctgaaagctgtttatatgacgaatcccattttcatcaagatagatgtcgtctgtatcggcaagcttgagagagacattcattgaattcacaatactgtattcagcccgatatacagcatcaccagccgtctgtctaatcgtccattcgcctttatcatacgttgtgcgttttgtcctgacagcttcaatgtcttttcttttgatgacaatccgcaattcttttatcatatcctgcgttttttcgaaaaggacagcttcagccagccgcattgtttcttctgagatttcccagcttacggtcaaggtgtgagcgttttgaatgattatgtcgaatgtgtccctaaaaaaggaaagcttatgtcgtatattatagggaaatgggtgtttatccatggactcttaacattctcctttccaatcgttcacttcgtgttcctattaaaccattacataaagaagaagcaaagaaagatttctcgacaaaatctcgtttttttcgcgaattcctttagaaactattggttttatggtataaaaaagaaggataaaaaaagaatagaaggtgatgaaacgtggaaattgctattattgcgttgtttatcgtcagtatagcgctaattgcattctcatattctcaaagagacccgatgaaagatgtagaacaggagctcgaaacactgcagctttctgcgatgcaggaaatttacaagctcaaaaagaaaatgacagtgcttgaggaagaattactggaaacaaaccttgtcattcgcaaatcaaagcagaacgacatcaatcaaaaaatcgctaaacaaatactttctaaatataataacggtatgtcagctgaagcgattgctaaagctgagcatgtatcagtggaagacgtgaatacgattatcaaagataatgagaaggtgctcgtatgacaaaacggggcattcaggcatttgctggcggcatcattttagcgacagccgttcttgcagctgttttttatctgactgacgaagatcaggccgctgctgtaaaagataataaaacagtaactgaacaagacgtgaacaattaccttgattctaaaaaaatggtttctgtgaaccgtgatgaatatcaaaaacttcttgattcaaaagagaaatcgttgaccgatgacagcagctcagacacgaaaacagacaaagtcaaaacgtacaagctcaaaattaaagatggcatgagcactgcggatgtatctgctattcttgaaaaagagggcattatctcttcggctcaagactttaatgactatgtcattgatgccggctatcacaaagaaattcgtgccggcgagtttaaagtaaaatcagacatgagtttcaaaaagatcgtaaaaacgttaacacgataaaaaaacaggctgactcagcctgttttttttcatccaaactttcctgaaatgtaatcgagagttctttggtccttcgggttagagaacattttattcgtattgtcgcattcaacaagctcgcccatgtagaaaaaggcggtttgatcagaaacccttgctgcctgctgcatgttatgcgtgacaatgacaattgtgtatttatttttcagctctagaatgagttcttcaatttttctcgttgagattggatctagtgcagatgtcggttcatccatcagcaaaatatcaggattggtcgcaagtgctctggcgatgcaaagacgctgctgctggccccctgacagcgaaagagcggacgtatgcaatcgatccttcacctcatcccataacgccacgtcttttaatgacttttccacaatttcctgaagcttcttcttatttttggtgccgtggactctcggtccgtaagccacattatcaaaaatagattgcggaaacggattccctttttggaataccattccgatattttttcgcaaatccacgatgtccactttatcctttaaaatgttgctgccattatagttcagctcacctgcaagctttacattcggcgtcatttgaatcattaaattcaatgtcttgataaaggtcgatttcccgcatccggatggcccgataatcgccgtaacctcattttcataaatgctcaaattgatattttttaaagcatgatgctgtccataccataagttcattccattgacttgatagacttcctgtttcattacagcttcggtagcaatactcattgccgccctcctatccgaatttcccgttaatataatcctctgtcttttgctttttcggactcgtgaaaatctgttcggtctgtccgtattctacaagctcgccgtttaaaaagaatgccgtccggtcagaaacccgcagagcctgctgcatattgtgcgtgacaataataattgagtattctcttttcaatcctgtaattaattcctctattttcgcatttgaaatcggatcaagcgctgaagctggttcatcaagcagaagaacagccggcttcatcgcaagcgttctcgcgatgcataaacgctgctgctggccgccggataacgagagtgcggatgaatgtaaacgatccttcacctcatcccagagggccgcttttgttaaactttcttccacaatttcatctaaaacagctttattccgctctccggcatatttcaatgcatgtgtgatattcgcatagatcgatttcggaaatggatttggtttttgaaaaaccattccgatttctcttctcaagctgacaacgttaatattgccgcccaatatatttaatccttcataaaggatttcaccttccgctcttgcagatggaattaaatcgttcattcggttaatatttctcaaaaaagtagattttccgcatcccgacggcccaattaaagcagtcaccgcatttttttcaatatccatgtttacatgatgaacggcttgtttatttccgtaaaaaatggacagatctttgacctcaagcacgtggttctgcttcggaacaataacagctcgctcaggtttttcttttaccatttgttcagacatgcttttcgcctctttccgttctaatttgccgtaagctttttgtagatcatcgtgccaagccatctcgccgcgagattaaacacaagaacagaaatcaccagcacggcagaaccaccgttggcaatcgcttcagcatccggaatcattccttgtgtattgacgttccaaatgtggaccgcaagtgtttcagcgggcctgaaaatattaagcggtgatgtttccgaaaacgggttccactccgtaaaattaagacgcggtgttgtcaggcctgccgtaaataataatgcggccgcttccccgaacacccttcctgacgctaaaattgctcctgtgataatagaaggaatcgcacttggaattaaaaccgtttttacggtatgccagcgtgatacacctaaagcgagagaggcttccttcagatctttagggactgaacgtatcgcgtcttctgtcacacgcaccatgacaggaaggttaaaaacagttaacgcaagcgctccgcctatgatcgtatatccccagcctgttaagttgacaaacatcaataatccaaacattccaatgacaatagacggaagagatgaaagcacctctatacatgttctgatgaagtcagttactttgttattaggcgcgtattcagccatgaagaccccgccgcccacaccgagcgggattgtaatcagcattgtaataaacaaaatataaaaggagttaaacagctgatctcgtatgcctcctccagctgcaatggcgctcgactttgttgtaataaattgaaaactgagctgagaaacaccgtttataataatataggaaaacaaacctactaaaatggcagcgataatggctgcacacaaaccaaacattccggtcgccagtttatctgttattttgcggttcattacactttcctcctagatgacaagtagcgaataagcaggatgaacaagaatgacatcaccagaagcacaagccccattgaccacagcgtattgttttcaacacttccgtatgtggtgtggcccatattcagcgtgatgatcgttgtcagcgttcccgcagtgtcaaacaggctttccggcaatactcttgtatttccaatgaccatctgaacagccaaagcttcaccgaacgcccgagccatgcctaacacaacagctgtcatcaatgttggaaaagctgcaggcacaagtacttttctgatcgtctgccatcttgtggccccaagcgcgtaagaaccctctcgtaaactcttcggaagagaagccattgcatcagcagaaatcgatgtgatcgtcggcagaatcatgacggaaaggacaatcgttcccgccaataaactgtgccctgttccgctcgatttgaactgggcgataaacggcaccaatactgtaagacctatgaatccataaacaacagatggaataccgactaaaagctcaatcaccggctgcagcactttctttccccaattcggggcaatctctgtcatgaaaatcgcacctgcaatgccaagcggcgcagcgattagagcagaaagaatcgttactgcaaatgagccaaaaataaatggcagcactccgtatttcggatcagtatctgtaggattccaatttaagctcgttaagaattcaattgggcttacaccatttacaagaaaagattgcagccccttcacgccgaggaaaatggtgatcgcaacagatgccgcaatcataatcagggcacatgctgtcacaatcattcttccccgaacttcatccaattgccgattttgccttgagctgattaaacgctcgctcacagacatattttctctattgtttatcattgttttacactcctatgaatgtgttaagaggagaaacggttgtccccgcactcctctttttattaagatcagctttgcttccctttggcatcgcgtgtcactttcatatcagtaaccggaatgtagccttggtcagtaacaatgcttttttgaatgtcttcactctttagataatcaagaaattctttagctaaacctgtcgcttcaccttttgtataagaatgctgataagcccagatcggatactcgccagttgctacatttttcgcttcaggtttaacaccgtcaatagatagagcagttactttgtcatctgttaaatatgagaatgcaagatatccaatcgctcccggagtatcagcaatgatctttttcaccgtgttggaggaatcttcagtaatgccttctgcaggctccgctccgtcaagcgcatatttcacaaatgtagcacgtgtgccggaagaatcagggcggtttacaagtgtaatcttttggtctttgccgccgagctctttccagtttttgattttgccagtgaagatttttttcaattcatcttttgaaatatccttcacaccagcatcagggtttacagctgctgccataccaactacagcgacttgatgatcgacaagcgcttttgcatcgataccttctttttcttcagcaaaaacgtctgaattcccgatctgaacagctccttcagagacttgagaaagccctgttccagaaccgccagcttgtacctgtatatcagcatcagggttttcttccataaatttttccgcggctgcaagtactagtggctgcattgccgatgaaccagaaatggttaaagaacctgatgccttttcttctccttttgcagaatcgctattcgattttttactttctcctgcatttccgcatgcagctgcaatcatcataaaagcagccatcagaagcataagcaccaatttgttttttttcatttcctgaattccccctgcgtataatgtgtaatttgtcctacacgtatagagtaaaggttctatgtaaaaagggtttgaaccgaatgttaaggttttgtaaatcagtgcgtttttttgtataaaaaaaacgcccacatcatgtgagcgtttctttttagttatcagaagacgttgtgttttctgcattttcttcgattttgtttttattcttttgctgagtatcttctttgtcctgcttcgatttcagctcaaaatatttatccattacttccctgccgatttcgtttgtaatggtatatttagcgctgtaatcaatataagcccaagggactactacagagatcgcaatctcaggattatcagccggtgcataggcaacaagtgtcgtattataagtcgatgttcctgtttttgatttatcaggtccatcatagaacgattgtgctgttcctgttttaccggcaggctgatatgacgctgaagcaaattgactggcagctgtcccttttgtcatcacccgtctgaatccggcctgaacctctttaatatattcactcttcatgtcgattttattcagcacttccggctgaacggattgtacgacagcaccgatccctcttttagcatcaggttctctgacttcctttacaagctgaggctttaagcgatatccgccgtttgcaatcgttgatacgtattgcgcgagttccagcggtgtatacgtgtcgtattggccgatcgcatagtcaagcaagaatcccgtcaatctgtctgttcctttatagcctgtcatttcattcggaagatcaattccagttttgacacccagtccaaattggctgaagtaattacggaacgtatcaaaggccgtcgtatcaatcggtaaagcctggtgcggtttatattcaccttttccgagcgcgatcgcagttttaaacataaatacgttggaagactgctctaaggctctttgaatattgaccggtcctaagttagtccatgactttttaccgcgtttatcctgactgccgatatacaatggttcatcctgaaaaactgtattcagattgatagctccggtttgaaggcctgtcaagactgttgcgcctttgactgctgaacccatagcgtaagatgacgtcattgtacctaaagcgtaatcatcaattttatatttcccattttcttgtttaatctgcttgcccgccattgaaagcacttcaccgtttcttgggtccatcatgacaacgaatgcccggtctaacaattgcgtgcttggtcttgctttagcagatttgaggttcttctcaatgattttttccacttctttttgcaaatcaatgtcaatcgtaagcacgagatccttaccggctttgccttcagataccgtttttgttcccgtgacattgccgtttgaatctgtgatattttcgactttggctttttgtccctgcagaaggctttcatattggtattccaaatagctttttccgaccctgtcattacggctgtagccaagcgacagataatggtcgagcaagttggacggcaatccttcattagagctggaaacacttccgagcactgagcgaagaaggtttttatacggatattcacgttcccaatcggacgtgacatcaacacctggcagttcgtctaaatgttcacttaccactgccatttccttcgctgatacatcttcgtttttgatatattgaggggtcaatgcatagcccgaatccatctgtcttttgatagcgaggatctgcatatctttatccgtcaattcattcaactgcttatcagtaatccgttttagctgaagctggtataaatcgtcatcggatatttttttgtcttcaacctgctgtctttctttagagctaatgagctttttcgcttctttcggtctagtcaaaatccaataatcttttttatcccgttctgttactttttttgtatcgactttgatcatgtcagacagcttttttgcgatctttaagcgctgttcttgcgtggtcgatttagatctcgtgtatgtgattgcatttaaagccttatttgtcacaatggcattaaagtttcgatcataaattttcccgcgcggtaccgctgagctgacttcactttgttcttgcttattcgcttggtttttgtaatcatcaccttgcacgatctgcttgatgcccagttccacaataatccaggtaaatataacaaaggcagctaaaaataaaatattcagccggatcggaagcgacttctttttctctttatgattttgcttttttggtttatttctcctcataacatcaccttttctatttacagaaagaaaagacactcaagtaagagtgccagttttcattttaaaggttttttcgacttttttctacagataacccctttttggcaaaaaaattatctctcgccttttaacagggtcggttctgttacccgtttttggccgtcttcttccatggtttcattttccccttctttctccttaaaacggatatccttgacaaagtaataaatcaaaggatgtcctatacccaatatcgcaagtgacaaaggaattcccacatcctctttcagaagggccacaatcaggagaaagcacaaaatggaaacaattctgccggcgttcaagaacatttctctaagcacgatatattcaattcttgcttttctggcatgcctcgcgcgccctatcacatcatatgtaagtgatacatatggcacaagcaacagaggatagccgatggcaataaaaacgccatacgttaataatgtcgaaaagctcatatggaacagaatcaaaaacagcgcgccatacaaaataagtccgcccagcaaaatcgatttttttctcgcctttttcttaatcagcctggatgcaaagtagtaggcaaagaaggaaacagctgaattgacaagaccgaatgtaccgagagcaagttcgctgtttgtctcaataaatacaaacacactgattaaaaagacaaaaatcccttctctcaaaccctgaaaaaaatgcgcattcgtgattctccgccaattcatattgctatggcgctctccaaatactttgctcagcataaaacggccctttgattctctccgttttaagaaaaagctcatcacgacagccagggcaaataaactgagggagagactgaaaatcactgtataacccgtattattttcaagccttgagatcacgaatccggctacaatcgggccgatcattcctgcagaggaagacagaatgcccataaacccgttgaaaaagtctcgtgtatccggctctgttatttcaaaggtcagtacgttaaacgctagccaataaaagccatagccaactccgagcaccgcgccgattagcacgaggcggctggccgccgtttctccggctaaaagcacacttaaataaaaggcagctaaaaaaatgacgccgaaccttaaaatgaataccctgtctatttttttggctaaccgtccagccaaataaaaggttatcggctgcattgtcacaatggataaattatatatcgccaaatcaataaatttccctgactgcttccaaagatacacattaacaaatgtattggacagtgcaattcccagcgagtaaagcccgccaatggtcagcagaaagagtaaccctttgtttacgtctacatcgcctatcactttttttagtttgctcattactgactcccctttactatcccttagtctgtctcactcaaaccgagatatgtaaaaagaagacataaaaaaacaaggtcccataatgaggaccttgtttgtgccattattttgcttcgctgtatagacgagccacttcgtcccagtttacaacattccagaaagctgaaatgtaatcaggacggcggttttgatagttaaggtagtaagcatgctcccaaacgtcaagacctaagataggcgttttgccttctgaaagcggagaatcttggtttggcgtgcttgtgatttcaagtttaccgttgttcacaacaagccatgcccagccagaaccgaagcgtccagctgctgctgctgcgaattgctctttgaatttgtcaaagcttccaaatacactgttaatctcttcagcaagcgcgccagtcggttcgcctccgccgtttggagataaaagtgtccagaataatttgtggttcgcgtgtccgccgccgttgttgcggactgcagtgcggatgttttcaggaacagaatcaagatctgcaacaagctcttcaactgatttgttggcaagagcagtgtttccttcaaccgctttgtttaaatttgtcacgtatgtgttgtggtgtttcgtatggtgaatagtcatagtttccttgtcgatatgcggttctaaagcatcgtacgcataaggtaattctggaagttcgtaagccatgataattcctccttagtatatatgtactgaaatgccgcttcacagcgagcctttcttcattcaatgtaacaaaagaatgctttgtaatcaatgaaaaagctcacgatttggctcatttcagcggacatatttcactttaaccgataatctgccccattaaacctgccgccagcatttcttataggaccgtccataaaaagtatccgatcatcaaaagctgtatgatgccctttgcaataacccctgttaaaaaaccaatgagtgagccgaggccaattttaaacgctgactttaagtccttctgatgaacgataagttctgcgcaaacagccccgataaacggccccaatatgatccctgcaaccggaatgacaaaaggcccgattaataaaccgatcgtgcttccccatatggcagctttgcttcctccgaacctttttactccaagcagattcgacacgtaatctgctgcgaataatactgcggcaaaaactgcctcaacaagccagaacatataagaatacggactgaatgaaaataaaaatccgtacaatacaaatccggcaacaataaatactacgctcggaataacaggatacaccagcccgataaaggcaatgataaaaaccgctgcaatcaacagccaatacaacatatccatagcttccatcctcccattttactctgtcttcttcatgtcttccttgtattcacacgcatgcaacgatacaataagcaacatatattagtttagctaggaagtgaagatagtgaatgtgtttcagcttttcattaaaagtacatactctccccgtgatattgcaaaaacaagatttcaaggaatcggaaaagcgattctttatgtatttttgctctctgtcctgtttgcaatccctaccgcttattatgtaagtacagggaccgtaaaatcaatgaacggctttaaaactgttttaaacaaagatttccctgatttcacaatttcaaacggcaaacttcaaacggatgagaaaaaagccacggaatctcaagcaaatggtttcgttatcgtgttcgatccgacagactcctatggcactgaacaaattgaagcaaagcaaaacgcgatcggcatccttcagaacaaatttgttttggccattgacggacaagcccaagaaatgtcttactcaatgatgccatcagagttacagaaaaaagatgtcattgcagggttaaaccaaaataaagcgatgattgtaactgttctctcagctcttatttttctcgtaacagcagcgggaaaatttattgaagtatcgtttttagcgcttatcgggttaatcattaagaattcgcagaaaaaacatttatcctatcatcagctctggaagctttctgcttattccatcaccctttcaactgtattctttacaatcatgcgggcattagaagcaaccgtaccaagtgaatttttgctgaactggtttgtcaattttgtcatcctgtttctcgttttaaaagagattccgtccaaaaaagctgctgtataaaccgaggctgcattcgcagtctcttttcttttgtcatgaatcgaaatggacaagcatactatggtataaaatttcgtatgcgggaggaaaagcgatgaagcgtctcaccttagtatgcagcattgtttttatactttttattcttttttatgaccttaaaattggaaccatacccattcaggacctccctgtctatgaagcatcagcaaaaacggctgtacaagaaccggcttataaaacggtgaaggtaaagccgggtgatacggttatgtcgatagtcggatcagcaggttctccggatgacattgtaaaggattttgaagcactgaatccaaaagtgaaagctaacgccattcaagcgggaacagcgtataaattcccggtctatccttaatttaacgttaatttcttgtcagttcggcgaagacactgttacaatgtaatttgtaaaataaattcacataaaccatactagaattgttatatctagaagcggcaactacaattaaggagcgattgcaagtgagtgaaatcacacatcgtacaaaaacgcgtcccgtcaaagtgggacctttaacaataggcggcaacaatgaagttgtcatccaaagcatgacaacaacgaaaacacatgatgtagaagcaacggttgcggaaattaaccgtttggctgaagccggatgccaaatcgttcgggtagcatgtccggatgaacgggcagcaaacgccattgcggatattaaaaagcgcatttccattcctctcgttgttgacatacatttcgattataaacttgcgttgaaagccattgaaggcggcgcagataaaatccgaatcaaccccggcaacatcggccggcgcgaaaaagttgaagcggttgttaaagctgccaaagacaaaggcattccgatcagaatcggagtaaacgccggttcattggaaaaacgcattttagaaaaatacggttatccgactgccgatggaatggtagaaagcgcacttcatcacattaaaattcttgaggatcttgattttcacgatattattgtcagcatgaaggcctctgacgtgaaccttgcaatcgaggcttatgaaaaagcggcgaaagcgtttgactacccgcttcacctcgggatcaccgagtcaggaacgctgtttgccggcacagtaaagagcgcagcaggactcggcgccattttaagcaaaggcattgggaacaccatgcgcatttcactaagcgcagatcctgtagaagaggtaaaagtagcaagggagcttctgaaatctttcggcttagcctccaatgctgccacgctcatctcatgtccgacttgcggccgtattgagattgatctaatcagcattgccaatgaagtggaagagtatatttctaagataaaagcgccgattaaagttgctgttctcggctgcgctgtaaacggacctggtgaagcgagagaagctgatatcggaatcgccggcgcacgcggtgaaggactgctgttccggaaagggaaaattgtccgtaaggttccagaggaaacgatggtagaagaactcaaaaaagaaattgacattcttgctgaggaacactacgcaaaacttgaagctgaaaaagcaaaattaaaagaagaaacacaaaaagcttgacgggaacccgtcaagcttttttgtgttagaaaaatggaataataaatattccaagcactaatgaaacgacaccgatacccattgcccaggctccaaggccttgagcacctcttcttcttgcgatatagccgacaataataccggcagctcccaataaaacaggcagtacaaacaatgaaataatggacaaggctaaagcgatatatcctattccccgtccttcattgacattgccgccgctgcgatcattgtcttggtcattgctgcggtcagcagcacgataaggctctgcgatttcagcagctgtttcctcaaaaaaaccgtcattgtcgcgggtaatatttgtcccttcagatccatgatcaacatagtaactgttgttatcacgcttttcgtaatcgtttgccaccttcaattcccccttctgttttattaaaggagcttttatagtttgatccattttgcctgattcatgtttgctaaacttttctgttaatgtcaattgtttatgttacacttgaagggatgaaactgaaggagtgtgggcatgttacgcttaggaatagatattgacggcacaatcacggctcaggatacattcgtcccttatttgaaccgttcgtttaatctttccatttcattaaacgatatgacggattatgatttaacaaagctgttaaacattacccaggaagaattttgggattggatgaatcaaaatgaagcgatcatatataaggaagcattgcttgcacagcatgcgaaacagtcacttgattttctcaaagaggagcacaagcttatttatattacagcgagacggactcatttaactgatattacctatgaatggtttgacagacaaaacattcattatgaccacatcgaactcgttggcggtcatcacaaagttgaagcggtcaagaatcataacatcgacctgttttttgaggatcatcacgggaacgccatgatgattgcgaaagaagccgggataccggtgattttgttcaattccccttataatcagcttccgattgattcaaacatcatcagagtaaacaactggctagaagccgttcaatggatgaacaacaataagcatcacttaatacgtgtcaataactgaaaaaggagcccaaaccgggcccctttttcatatatacgcattttacgcagtagtgttttcttggttttccgctgtacaatcagggcatgtgccataaatctcaaatttatgcccgctgacctgatagccatccaaatcatcacaaagcttgtccatcggacatgattcaatttcctttgttttgccgcaggcaagacaaataaaatgatggtggtgatgggtgaatgaacacttaaatcggaagagcttttcaccggacagctcagttgtttccaaaatcccaagttcttcatataaagaaagatttctgtagattgtatcaaagcttaagcctggataatcatcattcagtgcagacagtacgtttttagcggtaagatatctgtctgaatcagcaaaaagctgcagcatatcctcccgtttgtttgtatatttatatccgttttcttttaataggttcagcgcttcttggacgttcatgaagggtcccccttttcgctttgcttaagaacgtatcacatgtatgaaaaagaaaatggcagctgtctgtccagcaagccattttctttactgcagataaaattatacccataaaatgaataaaagtaaatgaaagcctagtggattgcgtttttgaattttccgcctctcgtttcatgagtattcataattgttatgaatgcattttgatcaacttcaaacacgatcgatttgagctttgtcacttccagccttgtgacaaccgcgtaaattacgtctttttcttcgtccgtatatccgcctttccccttcagcttcgttgtgccccgaccgagacggtgcaaaatcgcgtcggaaatctcatcatactgctcagacacaataatgacagcttttgtttcatcaagcccttggatcacggcatcaatcgttttcatcgcaatataataagtcatgaatgagtacatcgcttgctcaggaccgaacacaaaaactgcccaaatgaaaatgaacacattgatgaacataacgaactcacctactgaaaacgggagttttttggtcagcaaaataccgagaatttctgtaccatccattgaacctccgtttcgaataacaagcccgacgccaaagccgagtaaaagacctccgaacacagtagccaaaataggctgggttgtaatggcttctacatggtgaagtgaggattcaataacggcaagcccgacaatccctataaacgtagagactagaaaggtcttaccgatatatttatatccgaagatcataaaaggaatatttaatatgacaacgaaaaaagcgaaattgagaaaggggtttgacataaagaggtggtctaaaataagtgatacaccgataatcccgccatcaataaaatcattggggattaaaaataattcaatacttacagccgcagatgcagctcctaccagaatcataaagaccctgaaaataaaatgggtaaatgtttctttcttatgttgttttgttggggtcataaaatctcctttcctgcaataactattttaaatacattataaatctattttaccattaaacactgacacattttactgatttgcccatacattaagtctggaggtggaatgaccaatgattttatttcaaagaattattttacagcggcttaatcaggctactgctgatgatttgctgaagtactcaaaacaatacggaatcagcttaacaagatcgcaggccgttgaagtagcgaacttgttatacgggaaaaatgtaaacatctttaatgagagtgaacgaatgcggctgttgaaacaagtagagacgattacatcgaaagaaacagctcaaacagttaatgaactattcaaacaatttacaagctaaaaaatgggggtgttatcccccattttttattgctgtaaaatcttttcgagcaatgtatcatcaaattgtttttctttcagcatgtcaatctcaaaacggtatggcggttttttgttctttttatcttcaccgacatatggtgtttcaagaatttttggaatgtcttttaactgctcatggtgaacaacatattgcagtgcgtcaaaacctatttcaccaaagccaatattttcatggcggtcttttctcgcacctttgacatttttgctgtcattgatatgaagcactttaatacggtcaatgccaatgactttatcgaactcattcagcactccgtcaaagtcttcgacaatgttatacccggcatcatgtgtatggcacgtgtcaaagcacactgacagctgctcattgtgtgtaacgccttcgataatctgtgcaagctcctcaaagcttctgccgcattctgatccttttccagccattgtttctaatgcaatctggacattttgattcggatcaatcacttcatttaagccttcaataatttttttgatgccggcttcagctcctgcccctacgtgagcgccaggatgaaggacaatttgcttcgctccgatggccgctgtccgttcaatttctgaacgaagaaaatcaacacccagctcaaaagtggacggatttgtcgtgttgccaatattaataatataaggcgcgtgtacgataatctcgtcaatgccgttttcttgcatatgtgcccggcctgcttctatatttaagtcttcaattttctttcggcgtgtattttgcggtgcgcctgtataaatcataaacgtattcgccccataagagactgcttcctggcttgctgccagaagcatatgttttccgctcatagagacgtgtgagcctattctcagcaacaggttcccctactttcttttcttagattggtttcttctctgttttttcttgattttctccatctcatagctcattttctttttatacccaggcttaaccttcttcggctttttcacgagacgatgagcaatttcatccgcttcattcggcgtttttttacgctttttgcggcgctgacggtcatcgccttttttccattcgcccttttcaagctctaagtaatcaaattcgatgcccattttttcaagtcttactaatgcatcctcatcagtaagctcataaatggtcatcgcttgtcctgatgagccggcacgagccgttctgcccacacggtgaacatagaaatcgagatcatccggcagctcatagttgataacatggctgacacctttaatatcaatacctcttgcggcaaggtcagttgcaatgatatatgtgaattccaaatcattgatctgcttcatgacttttttccgctcacgtggtgttaatccgccgtgcagcaagccgattttcatgcctttgccagtcagatactgggcaatatggtcagccgtatttttcgtgttggcaaacacaatccccaggtatggattcagatgcgacatgatgtcaaaaaggagcttgtccttgtcacgatgtttcgaaggaatgaggatatgctcgattttcgcagcagtcacctgttttggctccacatgggcgtatttcggattttccatgtatttcttcaagaatggtttcagcttttccggtatggtcgctgagaacacaagcatttgcagatcctcaggcatgcgggaaccgatgtaatctacatctgcaagaaatcccatgtccagcattaaatccgcttcatcaataacaagagattccgctttatgaacacttaacgcctgttctttgattaagtcagcaatccgtccgggtgtaccgacaacaagatgcggctgtattttcaatttatcaattgatttttgtttatcagtgcctccgataaaacatttcgagcgaatctgactgccttcctcaccctgcgtgattttaagcgcttcctgataaatctggttggctagctctcttgtcggagccgtaatgactacctgaacgacatccttagcaggatcgattttgtttaataaaggcagtaaataagcgtgagtctttccagtacccgtctgagactggccgatgacgctttctttttttaacactgcaggaatcagccttttctggatatcagtcggttcgtaaaaaccaaggcgatgtactgcatctataataaatggtttcaattcataaagttcaaatttcgtttctttcatttttcccagctccttaaagcggcacattatgtgtccatcatcacattatacccgattttgcttaaaaacaccacgtttgcaaggcgtttgttttattcagttatgtaaagcaaataccgcagcccatgcatattctaatagcagagagagctgaaaggaggtacaagtatgttttcaccgcagcagccaatgagaaattacccacagcccggaccgccccgccccatgccaaatcagcgaatgatgggcagaagaccgcctaatatgcgaggactttcatttggagcacagcagcaaggttttcagcaagccggacaatttcttcctcaggcaaatgccggagcgagaaatggtgcaggtgcaggcggaggcttaaaaggaatgctgtcaaggttcctacccggcggaggaggcgctggcagtgccggagttccaggagttccaggagcaggtgccgcagcgagcggaggtgctggcctgcaaggcattcaaaatatcgccaatcctgcatcattatccagtatgcttggaaatgtgcaaaaagtactcggcatggcgcagcaagtcacccctatgatccagcagtacggcccattagtccgcaatctgccagcaatgatgaagctgtacagccaattaagtaaaagtgatgatactgagacagaggccaatgaggaaagtgaaaaacaatccgtttcagaagaatcatcagaaaaagaaaaagagactgaaacaaaaacctcagatgggaacaaaaaatcaaaaccaaaaagttcttctctcccaaaaaaatctaaaacaactgacaataaagaacaagaatcaaaaacatctgcctcgaagaaaaaggaagctgcctctcctgctccgaaaagaacatcaggcagttcaaaaccgagattatatatttaacattctttgatatctgaagtgagattggctataatgagatcagaagaatgcaagaatagagccgtttgattacggctttttatattgcctttactcacttcagtattggaggacaaccgaaaatggacgtaattaaaatttcaccgcgcggctattgctatggtgttgttgatgctatggtcattgccaaaaatgcgtcactagataaaagcttgccaagacccatctatatactcgggatgattgttcataataaacacgtcactgatgcgtttgaagaggaagggatttttacattggacggctctaaccgtctggacatcttaaagcaggttgacaaaggaactgtcattttcactgcgcacggtgtttctcccgaagtcagaagaatcgcagaagaaaaagggttagtcgcaattgatgctacatgtccggatgtgacgaaaactcataatctaatcttagagatgaaagaaaaaggatatcacgtaatctatatcggcaaaaaagggcatccagagcctgagggagccgttggcgtagcgccggagatcgttcacttagttgaaacagaagaagatgtaaagaaccttgatatccaagcagagaagttaatcgtgacgaatcaaacaacaatgtctcaatgggatgtccacgacattatggagcttgtcaaagaaaaatatcctcatgtcgaatatcaccaagagatttgcctcgctactcaagtgcggcaggaagctgtatcagagcaggcaaaaaaagcggacttaacaatcgttgtcggagacccgaaaagcaacaattcaaataggcttgctcaagtgtcagaggaaatagccgggacaaaagcataccggatcggcgacttaagcgaattgaagctcgaatggctgaaaggcgttaataccgttgcagttacagcgggagcttccacaccgacgccgatcacaaaagaagtcattcgctttttagaacagtttgatcacgaagatccatcaacttggacaactgaacataatataccgctcaaaaaaatacttccaaaagtaaaagcaaaaaactgaggctgtaaaagcctcagtttttttatagaaatgtaaatggatttgtatctgtttcagaaacaaagatattcacgtcaaactttttatcattacacattgatgtcagctttctcgtgacgccttctttcatgattttttccgcatagtgtcccggatcaaccacatttaggccaagcatcatggcatcatgggccacatggaagtataaatcccctgtgacgtaaacatcggctccctttcgttttgcatgatgaatatacttgtttccatctcccccaagaacagctacctttttcaccatgctgtcagcatcccccaccattctgacaccattgacgtcaagcttgtctttcacaaataaagcgaattccttgagcgtcatctcatttttaagggttccgacacggccgagtcctttttcggcaggagtctgttcaacaggatagatatcgtaagcaacttcttcatatggatggctttttatcattgcattgataacagctttttcgacgcttttaggaaatacagtctcaagccttacttcatgaacaagctcaagctctcccacttcaccgataaaaggcttagctccgtctaatggtttaaaactgccgattccttcagatgaaaacgcgcaatggctgtattcaccgatatggccagcccccgcatttccgagcgcggctctgacctgctcttcatattccttcggcacgtatactgccagctttttcagaggatccgtataagtaggcaccagcacttccgtctcactcagctctaatgcttcagcaagcaaatcattcacaccgccgtccgcaacgtctaaatttgtatgagctgcataaacagcaatatcatgcttcaaacacttttcaattaaccttccggcaggctgatctgttgaaatatgctttagcggccggaaaattggtggatggtgtgcaataatcaagtcaacctctttttcaatcgcttcatcgataacgctctctaacacatcaagtgtaaccatcacatttttaattggtttgtttaaggtgccgatttgcaggccgattttatctccttcaaccgcataggctttcggggaaaattgttcaaacagctggatgatctgctgcccatttacacttttagccatgatcgattacctcctttaacagctccattcgatcggcgagctcctttaatttttgtttgttttgctctgtatccgccgcttggctgatctgttcataaatgctttgagtgtgctgaagctcttgtgtccactttttcaaaaagacagcatttttttcttttgccaagaaagggccaacgagcatcccggctgataaagaaataccgtcataagccgcatccctgtctcccgcttctgccaccagcacctcatagcactttccgtcctcttcaaggattacctcatctatcagcgcatatctttctttataaagccactccctgatatgaacagcatgaatattcggctgtaaaatgagccgttccttccccgttaatttgtctttgcccgcttctaaaatatgagcgatcaaagatccgcccattccggcaatcgtaatggcatcagcttcaccttttttaatcacttccagtccgtctccctgccttacagaaatgtgcgagtttaagcctgatttttcaacctgccgctttgcagacaaaaatgggccgtctgttatttctccggcaatcgccccgctggctttatgattcagcaccgcaaaacaaggaaggtaggcgtggtcagagccgatatcggccatcaccgctccattcggtatgtactccgctactgtttgcaatcgtttagataattttaattcgttcacttgtcatcacaacttttctcaatcattttttcctttactatcatataaaaaatcagcccggaatccaagctgaagcaaatgattttgaaattatttcttttgatgggggtctgcacgcggcagtcaaaaataaaaggctgtcgagaacatctcggcggcctgtgaatgtataaagagaaaaatggttcttttatttaatttttgacacccactctgccatatcatccagcttatcggccggtacaagaccggaaggcattccattaccgcctttttcgatctttgttttaatttcagcgacatctttcttatcccctacaccttttaagctaggacccgaaacaccttcataattttcaccgtggcatgcgatgcagtttgccttgtaaatttcttctggtgaagcgtttgcatctttcttttcagcagatttgctttctcctccgcttgcaatctcccgagagtcatcaagtccttttactgataaaaagaaagttagaccaattcctaaaacagcgatcagcaaaaatggaataagcgggttccatttcatttcccttccccctttttgatccttccccctatgtaaacacttctaattctaacttatttttacaaaaagtaaatggattgctatacaaaagttttttattcacactttatacaaaattgaattgaaacatgcctaaatctctaatatcctttttattctattgtataatgtattgtatacgcttacaatagaaaatatggaattagattttgaaatttttcaccacaatgttcatttgcaaatgacatcatttttcagtaaaataaaggcatattatccatatatctttttaaaaaaaagaagaacggatcttcaagacccgttccatcttattcaaggaaatctttcaaacgtttacttctgctaggatgtcttagtttccgcaacgctttggcttcgatttgtcgaatacgctctctcgttactccaaatactttgccgacctcttctaatgttcttgtacggccgtcatcaagaccgaatcgaagacgcaatacattttcttcacgatcagttaacgtatcaagcacatcttccagctgctctttcaatagctcgtatgcggcgtggtcagaaggtgaagttgcttcttggtcttcaatgaaatcaccaaggtgcgagtcatcctcttcaccgatcggtgtttccagagataccggctcttgagcaatctttaagatttcgcgtactttttcaggcgttaaatccatatcttccgcaatttcttcaggtgttggttctctgcctaagtcttgcagtaattgacgctgcacacggattaatttattaatggtttcaaccatatgaacgggaatccggatcgttctcgcctgatcggcaatggcgcgtgtaatcgcctgtctgatccaccacgtagcatacgtactgaatttataacctttgcgataatcaaatttttcaacggctttcatcaggcccatgtttccttcctggatcagatcaaggaacagcataccgcgtccgacataccgttttgcgatactgacaacaagccgcaggttcgcttcagccaatctgcgtttagattcttcgtcaccttcttcaatcttttgagcgtaggcgatttcttcttttgcagaaagaaggttaacccgaccgatttcctttaaatacatacgaactgggtcattgattttaacgccaggcggtacacttaggtcattaaggtcaaattcttcttcggctttggcaagctgctgaatattaggatcttctgtttcttcattctcactaattaattcaacaccttgttcacctaaaaattcataatactcatccatttggtctgattcaatttcaaagctggacatacgctcagcaatttcttcatatgtcaaaacgccacgttttttaccagactctgttaattgctcttttacttggtcgaatgttaattctgtctcgtgggtttgtttatcagccattatggatccctccttccaaagcttgcaacgaattctataagcggtatgattcttattcggtccattcaggcgttttctatgtgaactgcctttaacaatgtgcgaataatgaaatgacaattcatgatgaggttaagcgatctatttgctcctccgcaaggaatcattgccaataaatgctcctcatcagttctccagttattttaaagatcggttcaatgtaacgatttcttgagccagagaagcagctcttaaaaaatctttttgcctttcggcttcggctctttccgcctctttttcttttatcattgaccaatttctttgattcaacactttttttacataatctgataactcggcttcgctaagctcttgattaacctgaagcattaatatatcggacaagagctggcttatatgatcatccgtcaccctggccatcagatgctgaggcgtcagctcggctccctcttcataaaaagcataaagataagcggctaatgcccggtgctcatcaatattaaattgaaaccctacccggtcaatcacttttttgatgacgctccgatctcgaagcatgtgagcgagtaacagcctttctgcattttcatacgccggacgcaaacgtttttgccttgcttttgtcgtcagatgcgctcgccgcgtttttgtttcaccgctattgtcagcaggtttgttttgcttgctgaaaacagacagctgctcagttaaagactcctgtgaaagcgaaaactctgaagcaagctgctttacatagacttcctgctctagagaccctgaaagcgtgctgatttctttcagtacgtctttaatgtaagctaggcggtcgccttcatcggacaggttctttccttttcggaaatattgcattttgaacgccattacggtgacacttgcgtcaataatgtcgtttttaaatttttccccgccgaattttttgatgtaatcatcagggtccaatccgtcaggaatcattgcaactctgactttgcagccttttttttgcagaagctccgaagcttttaaggtggcttcataaccggctttatcagagtcatagcaaagaatgatttcttcgacgtttcttctcaggatcttgacatgatcatctgtaagagacgttcccatcgtggctatgctttcctttacacccgagcttacggccgatatgacatcagcaaacccttcaaataagactgctctttcctgctttctgatatgaaggcgggccttataaaaattgtaaagcagtttgcttttatgaaagagcggggtttcaggactgttcatatacttaggctgctggctgccaagagccctgcctgagaaagcaacaacagccccgtgatgatcatggatcggaaacatgacacggtttctgaagcggtcgaaatatccgcttccgtcttcgcgtctgatcaggagacccgctttttccatttgcgcctcactaaatcccctctttacaaggaatttcgtgataaagtcccaagaatcaagagcatagccaatctgaaattcattaatcagctctttcgtaaagcccctagaaagcagataatccagtgcctcttgaccttcttttgtatttattaacaaatgatggtaaaatttcttcaggagctcatgtgcctcagccattttttgttctccagaagactctggccgggctccggaatggactgttatatcatctggaaaatcaatttggtatttgtcagcaaggtgagaaaccgactcggcaaaagaatagccttccatctgccttaaaaaagagaaaacattgccgcccgctccgcagccaaagcaatgaaaaatctgtttgtcgggcgatacggaaaacgaaggtgtgctttctccatgaaaaggacagagtccaaagtagtttcggccttgcttctttaattgaacataatcacctatgacttcaacgatatctgccgacttttgcacctgatccacaatttcatctggtatccgatttcccatcttataacactccgtcgtacattattcgatgctttagtgcaaaatcccttcatcgttcgacaggattttttgcagcagtgtaataaatcgttctcgatcttctttattcaattttttaggccctttggcatatacgccttttcttctttgtttgccggaaaaatgacggccctctagggcaaaatcaatcgtgtcttccttgtaaagacgacctctttccgacataacagagacatttctgttcaacagcagagatgctaatccgatgtcctgcgtcacaacaatatctcccggtttcacgtgatttgcgatatataaatcagcagcttctttatgaggatcaacatacttccatttttcttcattgcttctggaaagctgataatgttcaaatgaagcgacaaaaagaacttgaacttcatactcggatgctgtttgtaaaatttcatcttttaccggacaagcatcagcatcgacaaaaatcgtcttttcttgttcattaagaagagtaattctccatccctccattaaactcctgcataaaagcaagcaaaatcgcacatcctttattattgtggatgtatatgaatttgtcgaaaaatttccgggagaaattcttgacatcttacccataatagtttattcgtatcacacgatccttaaacctaaaattaatcattttatcacaattttttattataatacaaacttcacaaagatgctattgtttttcattattcccttttggcacagccaaaaacccaggatagagcgtcctgagttatatgttttttgttttgagatgatggataatatttgctgtttcctcaaccgctttatttgaaacatcaacaacctggcagccgatccgatccacaatcttttcgaaatactcgagttcctctttgattctgttgatatttgcataaatcgctttatcattaagcccgagtgattttaaacgttcttttctgatatgattcagtttatcagggctaatctttaaaccgatgcattttttcggatcaacgttaaagagttcttccggcggatcaacctccggtacaatcggaacattggcaaccttcaggcgtttgtgtgcgagatattgagacagcggtgttttagacgttcttgacacgccgatcaaaacgatatcagcttttaaaatccctcttggatcacgtccatcatcgtatttaactgcaaactcgatggcctccacttttttgaaataatcttcatcaagctggcgcacccgccccggttcgtatttcgctgttaaaccgtaggctgtttccattttatcaatcaacgggccgataatatcataatataaaacatttgctttttccgcttcggctatcaaatattctctgatttccggcaccacgagtgtaaaacagataatgccgcagtctgcctttgcaagtgaaatcacttcattgatagtgcctatatcttcaacataaggaattcttcttacatgagtatcatccgccgatccgttaaattggctgagtgctgcttttactaccaattcagccgtttcaccgacggaatccgatacaacatagatgatgcggttattcatattatccccccgttagtttgcaatcttataggatttcattttcagataaactgacaagtattttggtcatatttgtttttgtcactctgccgatcacttcaaagcctttatcggtgtctttgatgacaggcagtgcatcaatttgtttttctattaagtgctttgcaatgtccatcacataatcctcgcgtctgcacaccgtaatgttcggcatccttgtcatgatgatgtgaacagggaccgatgtaagctcctgctggccaatgctcgctctgagcaagtcttttcgtgaaagcaccccgactaaaacagcatcgcggtccaccacaaacagagtacctacatcttctaaaaacatggtgcaaatcgcatcgtacacagaaacgttttcgtgaatcactacggggatagattgaaagtctttcacctgaagctttttgagtttatccgccaaaagctgtgtgccggtttttcccgtatagaaataaccgactctcgggcgcgcctcgaggaatcctgacatggtgagtatggctaaatccgggcgcaatgtcgccctggttaggttcagcttttctgcaatatgctcccctgtaatcggcccgttttcttttacaatctgcaaaatatgttcttgccgtttatttagttcgatcgtactcaccaccttttcacttcatagctatgtaaagaaataataatccatattataacgtaaatatcttgtaatcaaacaaaaaacttataaatggggaaaagacgattaccgatcacacagcaaccgccttttctctctttattttacaataagggcattcatattcgcaaaggacttgatctcatccgccaagcttaccatttgcgctaaacgatttgcctttaatgactcattatccgctataaccattgtatgatcgaagtaagcatcgatcggttcttttaaggctgcaagtgaagcaagcgccgcctcataatcttttttgctgaagttttcctgcagattttgcttcgctgtttggtaggcatcaaacagttttgcttcgtattcattttcaaacagatcaggctgaatgtctccgcggactccttttttgctgatagagatcactcggcctaacgcttcggctgtttccttaaagccaggtgcaccaagcttttgctccagtacttgtgctttatgcagcgcagagtacggctcaagctcagagctttccagcacggcgtcaatgacatcatgtctgatttgttcagcattcaagacatatttcaagcgctgagtgaagaaatccagcagttcattttctttatcggtttgaacgaaagtaagcagctcttcaaatgaaattccccagttgcggtcaagaagaatcgcaacaataccgcttgcttggcggcgcagtccgtaagggtcctgggaaccggtcggaattacgccgatagagaagaatgaagcgattgtgtcaagcttatccgccattgctacaacagctccggtgaaagtagaaggcgtttctccgcccgctgatctaggcatataatgttcattaactgccgcagccacagcttcatcttcgccaagcattctcgcatacttttcgcccataattccttgaagttcagggaattcatatatcatatgcgtcacaaggtcgaatttagaaatttcagcagcccgcttcacatgttttaatgtatcttcatcagcctgaagacgaacggcaagtttctctgcgattgatgtgactctcctaaccttatcagcaagagaaccaagctcttcatggaaaacgatattttcaagtttcttcacatttgcatcaatgtttagtttctgatcttccttgtagaagaatgaagcatcagataaacgtgcgcgcagcactttttcattgcctcgggccacattttcaatcgcgtggctgttgccgtttcggactgtgataaagtgaggcagcaggtcaccgtttttgtctttgacagggaagtagcgctgatgctctttcattgttgtgacaagcacttcttcaggaattgacagaaactcggattcaaatgaaccgtaaagagctgtcgggtattctactaaatgattcacttcatcaagaaggtcttcgtcaactggaatgctccaattgttttcagcagccattgtttccagctgagattgaatcatttgctttcggacgctaggatcagcaataacatgctgttctttcagctgctcttcataagctgaaggtgattcaattgacgcttcatgtccgaggaaacggtgtccctgtgttgtccgtccagactcaacgtttgtgatcgaaaatggaatgacatcctgtccaaataatgcgacaatccatttgatcggtcggatataacgcaaatcttcatttccccagcgcatgtttttcgggaaatgcaagcttgtaattaaaccgctcaattctggcagaagcgacttcgtttcttggccggcttggaatttttgcacgaatacatactctatgccttttacttctttgatgtacaggtcttccacatttgcgccttggccttttgaaaagccgattgccgcttttgtccagttcccgtccgcatcaagggcaatttttttcgcaggcccttttgcttcttcttttatatcatcctgcttttctgcgacatccttaacgaacacagcaagacgtctcggtgtattgaagagtttcacttcaccgtgagtaatatttttttctttaagccagcctgtcagcttgtcgccaagctgaaccatgctttcattcaaaaagcgcgccggcatttcctctaatccgatctctaaaagtaaatcctgtttactcatgagaagaaccctcccctttaagcattgggaaccctagtttttctcgttcctcatagtaggtttttgctacttttctagctaaattccgcactcttgcgatatagcccgtccgctcggtaacagagatcgcacctttggcatcaagcaggttgaaagtgtgcgagcatttcagcacatagtcatatgctggatgaacaagtccgttgtccatttgcttgatcgcttctttttcatatgtgctgaacaattggaacagcatatcgacgtctgatgtttcaaacgtataaacagaatgctcatattcagccatcatgaataaatcttttactgtaaaccctgacgtccattccaagtcaaacacgttttctttatcctggatataagacgcgagacgctcaattccatacgtaatctctacagaaacaggtttacactctaatcccccgacctgctggaaatacgtaaattgtgttatttccattccgtcaagccaaacttcccagcctagacccgcgcagcctaaagacggattctcccagttgtcttcaacaaagcgaatatcgtgctcaagcggatcaattccaagagcacgcaaggaatccaaatacagctcttgaatgttatcaggtgacggtttaataatgacctggaactgatgatgctgatacagtctgttcgggttctccccgtagcggccgtctgccggacgtctggaaggctctacataagccactttccacggctcaggaccgatactgcgcaaaaatgtatacgggctcatcgtgccggctcctttttctacatcgtaagcctgcataagcacacagccctgactggaccaatgcttttgcaaggttagaatcatgtcttgaatattcatttcaagcacctccacttttctttcataagttgactgcgacagcaaccaaaaaactcccgtctctatgcttgccagccgcaaacatagggacgagagttctcccgcggttccaccctagttgctgagaacaaaatcccagcctcttttttaaaattgctcaagaatgcctttcgttgcgtgctcatccttagcttccaccgccctaaggtcgctttcatgaggtaaacgcaagtacttctttctctcactgcaacatattttataataaatgatcatataaaaagatggaccaaaagtcaacttttgttttcacccataagatgtttcatgctttccatttgatctaaaaagcgctttgattttaaatacaatcccgaatattcttcgtaatataaatcaatcacttgctttaattcagcttttgtttcctcttttaaggacacattgccgagcctcgacagatcaaaatagtaaaagagtcttaacagccttgccgtttgcggtttgatcggtatcctgtaaggatctttttcaaaacagcggtggcatataaaaccattatcacgaacagagaaatgaaaggttccgtcttggcttttacaatgtacacaatgatttagctcaggatacaggcccatgacaccgagcatcttcatttgaacaatgaaggtgataacatccggatctgttccttcattcagctgttttaatgactctaatatgaattcaaataaataaggatttggctttttttcttctgtgcctctgtcgactaactcagcaatataggcagcatatgctgttaaaaacaagtcttccctgatgcctctcatgctgaggatcatttccccctgctgaagcgttccgaggcccgatgttttttgcattaagaaagaaccatacaaaaagggctggctgactgctgataaacggctgttcggttttttggcgcctcgtgccataacacctatttttccgtgttctcttgtcagtaaagttacgattttattcgtctctccgtaatcatttgtgcgaagaacgattccttcacattttgtcagcatttccgcaccttcctcaagcaggagcggccaagaggtttataaaattggataatcaaatcgggctagctcatcttctagttcttcgggtctttccatgttctctttttccagttctttaaaaagaagatacgtatcaacatttcctgtttgagaaaatacgttccaggtaaaattcaacacaagaaacccacctttctgtagttaaactagcttacctaaactccaaattcttacctttatcttgaccagatgtcctccatttcatgttaaacaaaatttgctaatgtatccctgttcctgtgagataatgacacacacagctagagattaatattcgtcctctttaaagccaaaatcgcgaagctgggacattttattacgccagtctttctgcactttcacccacaattcaaggtagacacgggagcccaacagtgcttcaatatccgctctcgctctttttccaacctcttttagaaggcttccttttttaccgatcacgatgcctttctgggaatcccgctcgaccacaatcgttgccgctacgtgcacagaaccgttgtcctgccctttgatggattcgatggccaccgcaatgctgtgcgggatttcttctctcgtcaaatgcagcaccttttccctgattaattcagaaatgataaatcgctcagggtggtcagttacctggtcactcggatagaattgcggcccttccggcaaatacgcttcaatctgagcgagcaaggtttcgatgttatttccttctaaagcagaaatcggaacaatttccttaaaaggataacgtttgcggtattcgtcaattagcagaagcaattggtcgggatgaattttatcgattttgtttacgattaagaatacaggcgtagacatcgtctgcaatttctcaatgatgaattcgtcgcccttcccgtagccttcctcagcattgatcataaacaagatcaaatcgacttcttttaatgtattttgcgccactttcatcataaagtccccaagtttatgcttaggtttatgaatccctggtgtgtcaataaaaatggtttgtgatgtgcctgtcgtcagtactccttgcaccttgtttctcgtcgtttggggcttatcgctcatgatcgcgattttttgtccaatgactctgttcaaaaatgtagattttcctacgtttggtcttccaataatggatacaaatcctgatttaaagctttcgttcgtcatgtaaatcctccgatgaaaatgcgcctggcaataattcttccacagtcatttcttttatttgtccttgtaaattagtcagtacgacaataacgtcttttgtgcaaagctcagaaatcacctgtcggcaggctccgcacggagatactggtccaggggtgtcagccgcaacggccagcatctgaaactctgtatccccttcagaaacagctttaaataaagcggtacgctcggcgcaattgcacatgctgtatgccgcgttctcaatattgcagcctctgtacacttttccatccttggtaagaagagcggctcctacttggaatttggaatacggcgcatatgccatatcacgcgcttttaaagcttctgttattaattcttgtctgttcatgtgtacattcctctcttacctataatggtaccgctatcactttatattttacataatcgcgcgctttttttcacgcccatttctaaaaatgtaaaataaatgtaagaattttcagccattacagctttggcaaaaaaataagtaaaccaatgatacacgaaatcacggcaaaaacgcaaacagccccggcggcagcgtccttggccgctttagcaagagggtgatgtttgtcagttattaaatcaaccgtatgttcaatggctgtatttaaaagttcaagcgaaaacataccgcctatcaaaaggaatataatcatccactcaatcatgctgagctctacaaggaagccgcaaatgagaacagcgcaggcggctgcggcatgaaattggaaattccgctccgtccgcgctgtttcccatatgccccggcctgcatgcacgaagcttttgaagaatcgattcagctcatttctatgatcttttgagtccataagcgtccagcaattccttttgcttagtaaacatctcctcttcttcctctttcgtcatatggtcatatcctaaaaggtgcagaaatccgtgtacagctagaaatccgagctctcttttaaaagaatgattatactcctctgcctgctctcttgtgcgatcggcactgatgataatatcacctaaaaccggaggcatttcggcgcccacgatttcgatctcgccttccccctcttcttcaagagcaaatgagatgacatctgtcggagcatcctttccccggtattctttgttaatctgatgtatgtcatcattggaaacaatcgtgacagaaacttcagcctgatcctgaacgccttcacgctcagcggcaaattgaagcagattttctacttctttgagcatctcttctgagacgcttcccgtttcatcaacgatatcaatcagtaaactcatctatttcaccttcttagtagcctccggatattcaatccgggagtggaaaattccttttaatgttgcacagagcgtttttgcgattgtatccagctctttaaatgtcaaatcgcattcactgaactgtccgtcctgaagcttatcggatataataccccggacaagcttttcaattcgttcaggatttggattatgcatggatctgacggccgcttcaacactgtcggccactgatataattgcggcttcctttgactgcggcttcggccccggataacggaactcttcctctgtaatctggtcgcctttttccttcgctttatagtaaaaaaactttaaaagcgaggttccatgatgctgctcagcaatatcgacaagctctttcggaaatttatagcttctcagcatattcgcaccgtctgtcgtatgcgagataataatatttttactcaactgaggtgacagcttgtcatgcggattgtcaatattcatttggttttcaataaaatattgcgggcgctttgtttttccgagatcgtgataatatgcgccgactcttgcaagcaaaccattagccccaaccgcttcacaggctgcctctgataaattggcaaccattacactgtgatgatatgtacctggtgtttctgtcagtattttgcgcaatagcggatggttaggattagacagctcgagcagcctcatggtggataaaatgccaaagcccgtctcaaaaaacggcatcaggccgatgatcaatacagatgaagcaaaccccgacacaacccccatgagcattaacgtgccgatttcaagacccgacagcgcagtgttctggatcaataataaggatagaacgacaaccatattaataaacgccacgaaaagtccggtctgcaaaatctttgatcttgcattgtgttttcctaaaaataatacacctgaaatgccgctgatcaaataataaatccctatgacataattgaatgttcctgtcacaccctgattaaacatcatacttccgcaaatcgcaagaatgatacttcccaaaatggcaatgcgttcattcatcagcagtttgattaagatggcgcctgccgcaatggggaccagatagccgatattattatactccatcttctgaaacaaactgacaacctccatgatcacaagcaaaagtgttgtgataatcgagaataacagaatggattggtttttaaacttcagattttgtttctgtttttcaaaataatatacaagtgttgcaatgaaaagtccgatcataatcaatagcccgctgatcggtttaaagagatttgagttatttaataacccagtcagctcaagtttcctgtacacttcccgatcaatgaggtcattttcttccacgagcacttgcccctgtttgatttggacctgctggacattatctgaggcttcctgccgttttgcctctgttgctttcggatcgaaaacgtaattcggaataatagcaaaacgcccgatttctgtcgcagctcccaagtatttagacggaatagaattgctctttagctctttttctaccttatcctttgcatcagatagtttatccgaggggatttcactgctcatgaccgtatttactgcggtaatgaccgtatctctgacaaaagaaaagtcttcactgtctgctttcagcaatgtcttgatggaatcctccgatatagaatcattcacatctgatgtcaatttgtcctttacagatttgaccattgatttttccgatggtgatttactgccttcctccgatgattttttcacttcactaatactgtcgaatattgatgacacaaggtcaatccgattgtctgtatattctttttttaatgtatattgatcttcaaccgcgtcctcagcggcttgctttttttcctctgtggctttttgatcttctacggttgccggagcgtaaatggtcttgtcgctgactgaaaacaggtctaaatcaagtgtttccggcttaacatgtacaaagagcaaagcaaacataatggcagccagcagaagatacagcagtacatgcatggagcgggcatttttaaaactgctccattttttcgagctgcttttggtcttagccttctttttcaacacaagaacctcctcttgaaacatcaagcccataagcaatcataaaaatgacccgataacgcgcgatcgggtcattcagcattaattttgcttatcgtatgcttcaataattttcgcaacaagcggatgtctgaccacgtctgtctggtctagctcaatcatagaaatgccgtctattcctttcagcatctccttcgctactgcaagtcccgatttgacgcctttcggcagatcaatttggctgacgtcacctgtaatgatcattttagagccaaaacccagtctcgtcaaaaacattttcatttgagcaggcgtggtattttgtgcttcatcaagtataacataagcatcatcgagcgtccgccccctcatatatgcgagcggagcaatttcaatgatgcctctttccatcagacgttctgtatgatctgccccaagcacatcatggagagcgtcatacagcgggcgcaaataaggatctactttttcttttaggtcacctgggagaaaaccaaggctttcaccggcttccacggcaggtcttgttaaaatgatttttttgatatgtccgttttttaaagcatggactgcttttacgacagccaggtacgttttcccggttcccgccggaccaatgccgaatacaaggtcattccgcttcatagcggccacgtattcccgctgtcccattgtttttacacggattgatttgccttttgcgttttttgtaatttcttcttcatacatgctttcaaagtattcaagttcattcttctttgccattttgatggcgtaaatcacatcacgttcagagatctctatccccttgcgaattaaagcgaggagcgatcccagcagcctgtctgcaatctgaaacgattcatcatcgcctgacacataaatcgtctcgccgcgcgtaatgatatttacattcagatctttctccatcaatttcaaaaaagaatcttggttcccgaagagtgaaagcgcctcgtccgggtttttcagtttttgattcatcgcaagtaaatgttctgtcattcttcagtctccctgacaataggtgtggtttgaacgatatcttctataacttggtagagaataatcaactttactttaccattctcaacagtctggtgcaaaactttttcacttttcacctcgccgttttcgcctattttatcctctacatcctgtttacccaatttaatgccttcttgaactgcttcttctttcgtatattttcgcaaagcctcttcactttctctcgtttgctctttgacataggatacagggagcttaaatccgagaaaatgaagcgaatgcttttcttgttctgtttttggatgcttcaattcctcttttttaaacgtcatcccccagatcgggattgccaaagaaccaaaagaaagcttgtgctttgtccttactttgcccgtatagacgttaaataatgtttcaagcgggactgtcacttctgatctataccaggtttctccgtaaatttctgcttttgaggcgacttcctgctgatggtcttcgctgccgatcagtcccgaaacaagcagctgtcccttttcaacatgatcgtgtatggcggccatgggctgtcctttttgcacaaacattctcgtaatggttgctttctttttggcgacaatattgcgcgggctaacatatttttctttttcgggctcatttttctccacaactttcatatgaatggtcgtccccttcagatcaactccgacccaagtgatattgtctattccattggttaatgatttctgtattttttcgggcgacatcattaaaaactgcagacggccctttttgacgccgatttcattaagatgctgcctcatttgatgttctgtttcaggcttagcgcctgtcacatcaattttccacaccatattggacagcaaaaacaaaagaatgaaaaaaatcgcaaaaccgatcgtaaaccctatattcagctttgatttcagcaacaggaagggaaatcccttccgattgataaatcgggctttacatttaaatttacttcttacccgccgaaaggcatgtacatcctgaagctgtatatataacgatacggcttctttcttttttttgacatgaaagaccggaatcccctgtcttgtgcattcattaaggagccgctcaatccctcttcccgtcaattcaagctggaccttacccgaaaaaaaagacagccatttatttttcacaacatttccccctcggctttatgactcaacatatcgaacgacatcaatcgtaccctccaaaagtatctcttccggaagaatcgccttgatgacaaaatttttaccagatatgatgcactggccctgcttcagcatcagccgcacttcattctcactgaaaagcaaaaggcctctgtggttttctatgtagatatgaagtctgccaaccattgtaatcctcggcagatccatcataacgtccgggggaatttccaatgctcttgtcagccaagctttcatacgattctttctttgccccatacaaaaagaaccccctttcatctcatatgtatgatttgaaaggaggttctaacactttaatttttacgggccgggcgcatcgtacggtgaggttttttcgcccgtggaggtccgaacacctctcctagaacgatcccctgtacgacggtgtctttattcacctgaagcattttttgttttgtgtatactgttttttgtttggcagcagcaagatctcgttccagccctttcaggtttcttgctgtttccctgcgtctttcttccgcttcccgtcttgcctgttccatacggttagggataggtgcaggggcatcttcttttgactgcttcttttgaggagaagcagattgcatgtgttgaggttttttacttttttggctgttttgcttttcttctttgctctttttgccgaaaatcgcagaaatgattccgatgatcgctgcaataataagcggattggtcagtaaatcttccatcagcgttctcccttcttagagagattatgatttgcggtcttcatccgaagggtctttcgtcagcttgccgaatgaatcacgcatttctgtgtcagcatcgatgttcttgatattcatgtaatccatgacgccaatattcccttcacgcaaagcttctgccatcgcaagcggcacttccgcctcggcttctaccactttcgcgcgcatttcttctacgcgggcacgcatttcctgttcttgagcgacagccatcgcacgtcgttcttccgcttttgcctgcgcgatgtttttatcagcctcggcctgatcggtttgtaaaattgccccgatgtttttgccgatatctacatctgcaatatcaattgagagaatttcaaacgcagttcctgagtccaatccttttccaaggactgtctgagaaatcatgtcagggttttcaagcacttttttatgattatcagatgaaccgattgtagaaacgatcccctcacctacacgagctacaatggtttcttcccctgctcccccaacgaggcgctcgatattcgctcttactgtgattctcgctttcgctttcacttcaatcccgtccattgcaacaccggcaatgaacggtgtttcaatcaccttaggattaacgctcatttgaacagcttccaacacgtcccggcctgcaagatcaatggcagcacagcgctcgaatgtgagttcaatgttagctcgctgagcggcgataagcgcgttgacgactctgtcaacattacctccagccaggtagtggctttcaagctggtttgttccaacattaagtcccgctttatgggctttaatcagcgggttaacaacccgattcggaatgacacggcgaagcctcatcccaactagagtgaaaatgctgattttcactccggctgccaaagctgaaatccaaagcattacaggcacaaatgtaaaaaatactgccaaaacaatgatcgctactgcgacaattgccagaatcataagtgttgacggatccatataacttctcctcgtttctatttaaatttctctcacgacaatgcgtgagccttctactttaatcacttttacttttttatctttttctgtaaacgatccctccgaaacaacgtcaaggcgttcatcatcaataatcacggtaccggaaggacgcagcggtgtaaaggttatacccacttttcccattaagtccgtgcgcgtttgatttgaaacgtagccgctctccgtgtttgtagaatcatttaatatcaatttcttaaagaatttcatacgctttcccaacacccttgtcagtaaaataaaagctgtaatcgaaacagctgaggcgatcaagagagaaaccgccatgacagtgaagctccccgcggctaaaaacaggctcgcaataatcgctcccaaacccagtaatccaatgattcctccgggaagaaaaatctcaagcagaatgagaatcacccctgctataaagaggagaaccgtctcatacccggcaaggccggctgcaagatgcccgtaaaagaacagcaataacgcaatgagtccagccgttccagggaggccgacacccggggaaaaaagctctaccgtcagacctaaaaaagcgattgtcagcagaatagggacaatgaccggattcgtcagccatcttgctgtcttttctgcaaagctctcctttgcatagctgatctgcgccttttcgaacccaagcttctttacgagcgtggacaaattgtcagcagtgccttctgaatagcctacctcaatcgccttgtctgcgttaagtgtcagcagatctcccttaggcgcgccaacttccttggcatctatatctgggtcagccattgcgagcgcatattttggatcgcggttatttttcactgcggcatcttccatctctgccagccaaagtgattgagctttttggtcagcggcattgccttggccatcaacaatcgcggaggctcccatttttccgccaggcgccatataaatgtgatctgcttgaagtgcaatatatgcaccagcagacaacgcgcgtttgttgacatatgcagttacggggatctcactttcggttatcaaatcggccatatcaatagcagatttgaccaatccccccggggtattgatatcaagaataatatggtctgcatgtgcatcctttgcgtcttgtaacgaacgggacaaaaacgaggcgagaccctgttcgacatttttttcaaccgggatcacataaacagtttgtttttctgcttttgcgttcagctgtacgcctaataaagaaagtaaaaatatacccaaaagagcagcacggaatcctttgatttgaagcaagggcggtgtatccctccttccttttataataagtgccttctcttcatacgtaacaaatgtatcaaaggtttcatttttttatgtataaaaaaagacatctctcttagaaagatgtccttttctttgccatttaagacagttgactgctcacaagcttattaattaaacttccgtcagctttaccttttactttaggcataattgcccccatcactttgcctatgtccgcttttgagctcgcaccgacctccgcgatggtttcatttacgattgtacgcagctcttcttctgacagctgctcaggtaaataaacttctaaaatgtccagctctttttgaactttatctactaaatctaaacgattagcgtttgaaaattcctggagggagtctttacgttgcttaagttcacgagaaaggacagtgagttcctcatcctcggtcaaactgtctttcttaagcttaattgcttcattttgaagtgaagccttaaccattcgaacgacagtcagtttgtctttctcacggtttttcatatacagcttcatatcctggttgagacgctcaagaagactcataaatccaccctcttttagaatttgcgttttctagcagcttcagactttttcttgcgctttacgctaggtttttcataaaattcacgctttcttgcttcttgcaaagtacctgtctttgatacactgcgtttgaagcgacgaagagcatcttcaagcgattcgttttttctaacgaccgtttttgacattctctttccctccctccgaatacaccaatcgactacctttaagttacacatataaacatgtactttgacattataatataagccatcagtcaggtcaactaagtgagttcacttttccgtcatgagtgcgactgcctgtctatataatgaaagaaaggggttggtgaataggatgttaattctgattagctttactgctcttatattattctttctcgcaggcatgaacatgcttcgaaaaggcttaatttctatggcgtactcaaaaattgaagaacgtttgcttttatttacggaccatccgttaaaagcgtttcttatcagcattgtatttacgggaatacttcagagcagttcagcttttatggtcattgtcatcggctttgtaagtgcgggcgttctttcttttaagcggacgataccaatgattctggggacgaatgttggctctacttttacaactgaatttattgctatcaaaatggatattttgatctgggttcttttaataggaggtttattgttttttctgactggcaggtatcctttgaaacagctgggaacaagcttccttggactgggcatcatcttcttttgcatcagcggattcagccatcttgccgggccgctgacaaagctgaaaacgggagccgacgttctataccatgttaacgattcaaactggtccgctttgctcatcgggatggtgttaactgccatcattcactccagttctgtctgtatcggcattttgatgagttttatgaatgaagggattatcggactgacacaggcgatgagcgtcgtactcggatcaaatatcgggacatgcattacagctgtcatggctgctgtatccgggggatatgcggcgaaacagacagcgtatgcgcatgtggtatttaacgtgctaggggtggctctagtattgccttttctgaccgcagcgaccggctttgtagagcagttatcacccgatcctgcccaaaggattgctcatttcagccttttatttaatgtggtgacagctcttttgtttcttccgcttacaaacttgttttaccgcttgattcactttcttatcccggctaaataaaaaaccggtacattttaatgcaccgattttttaggttaagaagacaaacgcatatgttcagttatttcatcctcaaccacacggacaaactgtccttcgttgtaaggataacctgcttttaggattttgacttttacgattttgccgatcatatcttccgtgcctttgaaaacaaccttcatataattgtctgtgtaaccgacaaacatgttctcttcttctgtttctttataggcttcctcaggaataatctcaagcacttcattttcatactgagaagcgtattcttttgcaagctggtcagaaagagcaatcaggcggtgcacacgttcgtttttcacgttttcatccacttggtcttccattcgcgcagctggtgttcctgtacgtttactgtaagggaaaacatgtagctcagagaatttatgttctttaataaagttataggtttccataaattcttcttctgtttctccagggaacccgacgatgacatcagaagtaacagctaagcctggcagtgcttttttcaatttatttaaacggtctgcaaagaattccattgtatacttgcgtctcatccgtttaagcactgtgtttgatccggattggataggaatatgcaaatgattcactatcttatctgagcggtctaagacctcgatcacttcgtcagtgatttggctggcttcgattgaagaaattctgatccgtttcacgccttccacacgggtgtctaattcgctcaaaagcttagcgaagttgtaatctttcatatcttcgccgtagccgcctgtatgaatacccgtaagaacaatttccttatatccggcatcaacaagctgctgcgcttgtttaatgacctcttcaggatcgcgggagcggagcaggcctctcgcccacggaatgatacagaatgtgcagaaattattgcagccctcctgtattttcaatgacgctcttgtgcggtccgtgaaagcaggcacatcaagctcttcatatactcttgctttcatgatgttgctgacgccattaatcggctggcgttcttctcggtattggtcaatgtagccaagcattttttcacggtcctgtgttccgactacaatgtcgacaccggggatcgccataatctcagcaggtgaggtttgcgcgtagcagcctgtgacacagatgacaccgtcaggattttgacgaatggcgcgtctgatcacttggcggctttttttatctcccgtatttgtaaccgtacatgtattaatgacatatacatcagctgtttgttcaaagtctcttctttcatagcccgcttctttgaaaagctgccagattgcttctgtttcataatggttgactttacagccaagcgtatggaaagcaacagttgccattactgatcacctcttaataactctgtttgataagaaatcgcgctcaacgcgtatagcggagcggtttctgtccttaaaattctcggtccaaggccgcacggcacaccgtcttgctctgtgagccgttcaacctccgcttctgttaaaccgccttcgggaccaaatacgatcaatagagatgatcccttcggaaggctgcttacaatcgcgctgaatgcgcttatttccccttgcttcgatgactcctcgtatgcaacgacacatttatcgaaatcctgcatcctttgaagaagctgctgaaaagaatggacatccatcactcgcggcacttcgttacggtacgattgctcagccgcttcctttgcaattttcgtccatctttcccgctttttctttgcctttttgtcatccagcttgacaacagaacgcgcggcttggaaaggaataaaggcatgagctccgagctcagtccccttttggataatccattcaagcttatctcctttcggaaggccgctcgcaatatagacctttatcggaagctctctgttttcattcgtccattctatcacaaggcaggacactttatctttggaaacagattgaagttcacattttgcctcgaagccgtcttgagagcagcagataatctgatctccctcattcattctcatcacgttcacaatatgatgaacatcttcgccggtaatcgaaaaagccggcgcttcctctatttgctgcttcgtgagctcgataaaatatcgttgcatacgctgtgacacctactaactgttattttttcgcaataatgctgacccaatcttccattgaaaggatttctacaatggtaaagccagcttgttccagtgcttcttttacttcttgttttttatgaccgatgattcctgacgtaataaagtggccgccttcttttaagaggctgtacgcttgtgaagtaaagcgaagaatgacttcagccaaaatgttggccacaatcacatcatgttccccttcaatcccgtctaacaaattgttttgcttcacttgagcaatatcgctgactttgttcagcttgagattaaggcgtgcactttctacagccacgggatcaagatcgtaggcatgaaccgattcagcctcaagcattgcagccgcaatacttaaaattcccgaaccagtgccgacatcaatcaccttatcacccttttgcacaaagcgttcaagcgcctgaatgcagagtacggttgtcggatgtgtccctgtgccgaaagccattcccgggtccatttcaataatcagttcatcagtatggaccggcgtatattcctcccacgtcggcacaattgtaaacttttcagaaattttcacaggatgataatactttttccaggcagtcgcccactcttcttcatttacttcagaaatagtgatgtggtttctgcccaaatcaatattgtaaagaaggagattattaatcgtttctttgatgccgtctacagtttcgcccagaaaactgttaaccggcagatatgctttgacaatgacaccctcatctgggtaatcattggggtcgagctggtagatttccccgtacacattctcacgttctttaattaaatcaagcgggtcctctatcacaaccccacttgcaccagcttcatgcaatatatttgagataggttcgaccgcttcatgtgttgtgtgaatgcttaattcggaccatttcaaaactaccaactcctcatccaataattaatcgcctttaaacgcccgttttaccttgtcaaagaaactcatttcctgttcgtcaggcaggtttccgctgacttcggcaaattcgcggataatgtctttttgtttatctgtcagatttgtcggcgtaacgacgcggacgacgatatgctggtcaccctgtccatagcctctgacattttgaacgcctttgcctcttaatctaaatttcgttcctgtttgtgtaccggccggaattttcaatttcacttttccatgcagcgtcggcacttctacctcatctccaagagcagcctgagcaaacgttaacggcatttcacagtaaatatcatcgccgtcacgctcgaagaactcgtgtgcgcgtacatggaacacgacaaataaatccccagcagggccgccgtttattcctggttcaccctgtcccgagagacgaagctgctgcccgtcatctacaccggctggaattgtcacattgattttcttgcgttttttgatttttcctttgccgccgcagtccgcacatttgtttttaatgattttgcctgtaccttcacagtggtggcagacccgtctgttaacgacttttccaaacggtgtattttgctccacgtttaactggccggagcctccgcagtgggagcatgtttctggatttgttccaggtttcgcacctgagcctttacatgtttcgcacgtttcctcgcggggaatttcgatggttgtttctttaccgaaagccgcatcctcaaacgacagggtcatcgtatactgtaaatcagcaccctggcgcggagcgtttggatctctccgtcttgtgcctccgccgaaaatacttgagaaaatatcatcgaaaccaaaaccgccgaaatcgccgccgccaaaacctccgccgccgaagccttggttagggtcagtgtgaccaaattgatcgtaatgcgcacgtttttggtcatctgacagcgtttcgtacgcttcttttacctctttaaatttttcatctgatccggcttctttgttaatatcaggatgatatttttttgacagcttccgataagcttttttaatttcatcctttgaagcgctcttacttactcccagcacttcatagtaatcacgcttactcatctcgcttcactctcccgaatttctcacataaattagattgtatcattttgaattatgatttttcaattccttttatcccgggcaagaaaaaaagtcaaagccaagagatgcctgactttgactttctaatcattgaatcagattatgaaatgtgttcttttcggtcagctccggaagcggggctgacactaaaaagaacttattttttgttttggtcgtcgtttacttcttcgtattcagcgtcgacaacgttgtcatccgctttgccttcagcgtttgctccgccttgagcttgctgtgctttagcagcttcttcataaagcttcatagaaagctcttgaacgattgtttgaagctcatcctttttcgctttgatctcttcaaattcgtttttctcaatcgctgcttttaaagcatctttggcatcgttggcttttttcacttgttcttcgtccactttgccttcaagatcttttaatgttttctcagtttggaaaacaagctgatctgcttcgttgcggacttcgatttcttcttttttcttcgcatcagcgtcagcattttcttccgcttcttttaccatgcgttcgatctcttcatcagagagacctgaagaagatttgattgtaatgttttgttcttttcctgtgcctaagtcttttgctcttacgtttacgataccgtttttgtcaatatcgaaagaaacttcgatttgaggcacgccgcgcggtgctggcgggatatcagtaagctggaagcggccgagtgttttgttgtcggcagacattgggcgctcaccttgaagaacatggatatcaacagctgtttggttatcagcagcagttgagaacacttgagatttgcttgtcgggatcgtcgtgttgcggtcgatcagttttgtaaacacaccgcccattgtttcgataccgagagaaagcggtgtaacgtcaagaagaacaacatcttttacgtcacctgtgataacgccgccctgaatcgcagcaccaagcgctacaacttcatccgggtttacgcctttatgcgcttcttttccagtttcttttttgattgcttcttgtacggcagggatacgagttgatccgccgacaaggatgactttgtcgatttcgcttgcagaaagtcctgcatcttgaagcgcttgacggacaggacccattgtgcgctctactaaatgagaagaaagctcttcgaatttagcgcgagttaatgtaagttcaaggtgaagcggtcctgcttctccagctgtgataaacggtaaagaaatttgcgtagaagatacgccggaaagatcttttttcgctttttcagctgcgtctttcaaacgctgaagcgccattttgtcttttgacaaatcaatgccgttttcttttttgaattcagacacaagatgatcgatgataacttggtcaaaatcgtccccacccagacggttgtcgccggcagttgaacgaacttcgaatacaccgtcgccaagctcaaggatggaaacgtcgaatgtaccgccgccaaggtcgtatactaggatcgtttgatcttcatctgttttatcaagtccgtatgcaagcgctgctgcagtcggctcgttgatgatacgttctacttcaagacctgcaattttaccagcgtcttttgttgcttgacgctcagcatcgttaaagtatgcaggaactgtgataactgcttttgatactgtttcgccaagatagctttcagcgtatgatttaaggtgttgaaggatgatagcagacacttcttgtggagtgtaatcctttccttcaatttcaactttataatcagtacccatatgacgtttgatagacataattgtgttagggtttgtaatagattggcgtttagccacttcccctacttgacgttcgccgtttttaaatgcaacaactgatggcgttgtgcggtttccttcagcgttagcaataactttaggctcgccgccttcaagcactgccacacatgagtttgttgttcctaagtcgattccgataactttactcacttgaataacctcctgctatgtaattattgattcactttgaccatggaagggcgaatgacgcgatccttcagcttatagcctttttgcatttcctcaacaacaatgttggagccgtagttttcgtcttcagcctgcataacagcttggtgcagattaggatcaaattcctgccctacagcttcgatggcttcgacgccttcttttttcaaggcttctacgagctgacggtggaccatttccattccctggagcaaacttttcgtctgttcattgtcggcttcaacctgaagcgctcgttcaaagctgtcaagagccggcagtaaatcagtcacgatattttgagaacggtatttttgggacgcttccatctctaaacggctgcgtcgtttatagttttcaaagtctgcttgaacacgcaaaagtttgttttctttttcctcaagcaaaccttgcaattcgttaatttggttttgaagaagttcgctttcatttgtttcttcctgctgttcatcagcggcagcttgttcttcaatgatttcttgctcttctgtttcgttttgttcaacggtttgtttttcttctgacattgtgttcacctccctcaaagtgtaaggagaaggacaggtgctgcccttcgataaaatttgccaaaattcccttattcatcatacagacttgttaatgcttttgacaagtccgaagtcacatgctgaagcaggctgacaaccctggaataattcatgcgggtcgggccgatgatcgcaattgagccgatctgcttctggtctacggaataagaagccgttatcagactgcaattttccatctcttcatagtcgttttcttttccgattttaatcgaaattcccgtgtgcggggattgaaccagctttaaaacatcctgttctttctcaattaatgaaaggagcgaccgaactctggtgatatcatggaactcaggctggttcagcatattgattttcccgccaaaaaacaacttttcaacgtgatttgtggaatgaaatgttgaacgaagcgcgtcgagtatattgtcatagtttttaatgtgctgtcttaggtacatgacaacttccttaaatatgcgctcattcagttcatccattggaacgccgcttaaacggtcgttcagtatatttaccagtttttcaatatcagacagatccattttggtcggaaagttaatcgttttgttttccacatgccccgtattggtaacgagaatcgctaccgccatatcaggctgaatcggaatgatttgaatctgtttaaggtaattctcactcaacttcggcccgagtacgatggatgtgtaattcgtcagatcggacaaaatttgcgctgatttttgaactgtcttctccagctcgaaaattttctctttgaagatcgagtggatttggtccaggtcgcttttcgtcaatttgacgggtgacagcaaatggtcaacatagtaccgataccctttttctgacggaacacgtcctgaggatgaatgggttttttcaataaagcccaattcctccaagtcagccatctcgtttcttattgttgcagagctaaatgtgatttcatcttttttcgaaagagttcttgatcccaccggctgtgccgatttaataaaatcgttgattataacctgaaggatcagcagctgacgatttgttaacatcatcatcacctctgttagcactctcaataagcgagtgctaattctataacaaaagtatcaaaccacaagaaaaatgtcaattataactcacccaaaaaagcgccaaaaacttcattgcctaataatttcccttgatgagtcaaataaacggcagactccgaattgtgaatcagccctttttcagcgaggtcttttaacacgcttgggaaaagtccatccagggaacggccgtatttttctgcgaatcgttttttgctgacaccggctgtttttctcaaacctaaaaacatttcttcctcaatctgttcttctgttgttacttcatgtgtatctctgtacggaaaacccttttcagctatcaggtcaatgtaatgcttaacaggtccgacgttcactgttcgtgtgccgccgatatatccgtgagcgccggctccgaaaccgaaatattgttcgttgctccaatacgttagattatgcttagattccatgcctgccttagcaaagttgctgatttcatattgatgaatgccgtgagcttccatctggctcatcaccatttcatacatttcagcttcctgctcctgcggcggaagatgaagccgccctttttgcatcaaattataaaataccgttttcggttctacaataagggagtaaacggaataatgctcggcatccagtgataaagcagtgtttatggaatgttccagatgcttgagggtttgccccggaagcccgaacatgagatcaagactgatattctcaaaaccgatttcccgcgctctttcaaaagaggtgaatacatctttttgcttgtgcactcggccgattttttctaacagatcgtcttcgaacgtttgcacaccaaagctgaggcgatttacgcctgcttcttttaatatttttaatttctctgcggacaagtcgtccggattcgcttcaaccgcaaattccgataagtcgcttgagggctttagcacgcggttgatcatatctatcagctttttaagctgttcctcagacagggaggtcggcgtgcctcctccgataaagattgttttaagatcaggctgcccggtttttgctattgtatttatcatttcctgttcgagtgcgtttaaatactcgtcgactggctgactttgaataaaatatttattgaaatcgcagtagtggcaaatatgctcacaaaatgggatatggatataagctgatttcaacggattcaccttctttacagaaagaagccgcagtacaagactgcggcggcttctattgttttttcggactgtcgtccattttcagaactgccataaatgcttcttgcggcacttcaactgagccgacctgcttcatacggcgttttccttctttttgtttttcaagaagtttccgtttacgcgagatgtcccctccgtaacatttagccaatacgtttttacgcattgcttttatggtggagcgggccacgattttctggccgattgcggcttgtaccggaacttcaaactgctggcgcggaatgagttctttcagtttttcaacgatcacttttccccgttcatatgcgtaatcacgatgcacgataaaggaaagggcatcgattttttcaccattcagcataatgtccattttcacaagcttggacggtttgtagccgatcagttcataatcaaaggacgcatagcctttagtgcttgatttcagctgatcaaaaaactcatatacgatttccgctaatggcatatcataaatgatgctgacacggtttgcgtctaaatactgcatatcaatgaaattgccgcgttttccttggcaaagctccattacagcgccgacatagtcattcggcaccatcatcgtcgcttttacgtatggctcctcaaccctttcgatcttttgaggatccggcatgttggacgggttgtcgacaacgaccttttcgccgtctgtcatatacacgtcatagataacgcttggcgctgtcgtaatcaggtcgatgttgaactcacgctcaattctctcctgaatgatctccatgtgaagcatgcctaaaaatccgcagcggaacccgaatccaagcgcttgcgaagtttccgcttcatattgaagggaggaatcattcagctcaagcttttcaagagcttcccttaaatcattatacttcgctgtatcaatcggatacaaaccacagtacaccatcgggtttagcttgcggtatcccggcagcgcttcttctgcaggattggcagcgctcgttattgtatcaccgacacgtgtgtcaccaacatttttgattgaggcagtcaggaagcctacatcaccgaccgtcagttcatttgtcggagttgctttcggcgtgaacacgcccacctctgttacttcgaattctttgccggttgccatcattttgattttttgtcccggctttaccgttccttcaacgactctgatataagccacgacaccgcggtaggcgtcataaagcgagtcgaagatcagcgctttgagcggcgcctccggatctccggtcggagctggcaccttttctacgatttgttctaaaatctcctcaataccgataccggcttttgctgaagcaagcacggcttctgatgcgtcaaggccgataacgtcttctacctcttggcgcacacgttcgggctcggcgctcggaaggtcgattttattgatgaccggaaggatttcaagatcgttgtcaagcgctaagtagacattggcgagcgtctgcgcttcaatcccctgggctgcatccacgacaagaatcgctccctcgcaggcagcaaggcttcgggatacttcatacgtgaagtcgacgtgtcccggcgtatcgattagatgaaagatatattcttctccgtcttttgctttatatttaagctgaacagagtttaatttaatggttatgccccgctcacgttcaagatccatagaatcgagcaattgttctttcatttctcgttgagtgattgccgacgttttttctaaaatacgatccgctaaggtcgattttccgtggtcaatatgggcaatgatagagaaattccgtattctcgattgcctctctaaacgcttttctttatctgtcacaatctatcactcctactattaaacgcaaaatacactagcttagattatatcaataggattgtaaagattcaatgtaaaacaagaaagagaaaagttccctatcatatctgggttgcttttctctttcacgtacttattgattcatatcccgtatccattcatacattgactgggcagtattggttacggtgtccgaaagcgcttttccggcttttgaaaacatattgaatgtctccaccttttccagctctttttgtttttcttctaaatcttttgccgtgactgtttctcctaggattgaggcttctttttcattatcttttccgtcggtgagcgtaaacgcccccttcagtgaagggtcatgatagcctttcatactcagcatcccgtggtttgcctgctgcatgccgaacagaacgcctaaaaacatgatcgtgacaagcagtaagcactttccaaagtatgcaatcaaatcaaccacctatttcttattgttttttcgtctccccgctcgctgcgttgaccttttcagcatcccagtacatttcgctgaatacgtccgcggccgcgttagccgcacgctgcagctcttcgagattattatccactccgccaaactcgagcaaaagcgctctatcggttaaatcctgattgtaaacaccattatcgcctggcgagcctttggaaaagacacctgtgctaagtccggggtattttttctccatcagtttatgaagctcactcgcaattttatagttttcttcgaagtttttgctttttttcccgacgacaaaggctaccctggcatagcttttccctttaatcgttgcggttgtgtcttttttgcgccgagagtctctgtggatgtcaatgatatattgcagatttttgtttgaagcgagggcgtctttcacgaccggccttgattcatcataggacctggcatagtttaagccttttttattcaattttgactgtatatcggttttattcactgtggctccgattccctgggattcaagcgcttgtccgaacatatctcctacaagcgtgacattggctttagaatggcgcgccatgtcaggatcggtctcgccttttaatagagggagatatgattccgtattgtgcgtgtgatagataaacacgacctttttatcacctgttgtttgtttcggcggatctttttgcgcattatctgattgcgtttgctgtttttcaatctctgccaaattcgcttctctttcttcctccatcaccttagacggcggcggcgattccgcaggcatattcgtataatccgttccttgtccagctaacaaaatctcggtatcaaattgtgcaaatcctggcagctcccgaccgagaaagctccgcggatcttcgaggttaatgctcgtcgccagctttaaagaaagacgagaaagatgaaatgagctgtctgtttgagagaggtcagaagcgaaataatggttttccatctgcagcaaatgtgcaaatacgtcacccggcaattcttcagcaatcccataaaaagagtcagacgacggcctaagttccggccggagagacgtcagcacaccggatagaacaaaaatcacgataaggcttacgataaatagaaagatggcttttaccgctttccctccatttaccgcaacaacaatctgtctgtttctgcgtttatttctcattgaatccctccagcgcttgtctagtaattactctatgaacaagctagaggaagtagaactgtttagtgattgtaggagcctttgttttcttgtgacactttttcatgaagcgctgtgtttaatccgttcgctaaaacatttgccatatcgtcgataaatgaatcgacttccttcggtgtaaccattaagttgtgccctaaaggcgaaagcacctcgtgaatgagctgccgtttttcatcttcttgaagggttccgacaatacctaggaacgattggcgctgcttttgatcgggaagatcgtcttcagtgagcactttctttttcccaaacgtcatgcctgccggaacaagcgatcttgatggcctgttatccttcatttctctgccaaaatgttttaatatgtagtccaccgtgtcgctggcaattgtcacggcatcaactactgtcggaacaccgatagcaatcaccggaacaccaagcgtgtctttgcttaaatcttttcgtttattccccactccagaccccgggtgaatgcctgtatccgatatttgaatggttgtgttgaccctttccaccgcccgcgccgccaacgcatcaatggcgatgacaaaatcaggcttcgattgctcaatcacacctttaataatgtcacttgtttcgattcctgttatccccattacacccggtgcaaaagcactgacaggcctgtaaccctcctgtacgttttccggctgaagcttaaacaagtgccttgttaccaacagattttctactgccatcggtccaagcgcatcaggtgtcacgttccagttgccgagcccaacgatcaaacagctcgcatcttttgagatattaaggttttcaagaaaagctgagaattcctccgcaaagacagcagagaccttctcttgcatttccgaatcattctccctgattccctgtgcttcaagcgttaaatagcgcccttctttttttcccgaaagctctgcgccttcctttgtaacatcaactgtgcggattttaatgccgccgtgatcacgctctttttcaataaagcctttaatttcttttgtcggcacagcctgctgattggccattgcttccttcgtttccactgccaaatcggtccgtatcaaatactgattcacatccagctcactctttttcatacaggggcctccttcacattaagtacctatattgttgccatttgctgaataaatcatgctaaaaagagaaccttcaatgaaaaatactttacatttatattgcaatctaaaggtgtgtttgatagaatacaatttgttctattgtgaagaagatttaaccttaagacactgtgctacaggttgtatcttaggaggtgaaacacatgccaaacattaaatcagcgattaaacgtacaaaaacaaacaacgaacgccgcgttcataacgcgacaatcaaatctgctatgcgtactgcaatcaaacaagttgaagcttctgttgccaacaacgaagttgacaaagcgaaaactgctcttactgaagcagctaaacgtattgataaagcagtgaaaacaggtcttgtacacaaaaataccgcagctcgatacaaatcaagactagcgaaaaaagtgaacggactttctgcataatataaaaacgatcctcaataatggggatcgtttttttcatttctttttaacagctgtaaaaggaacagttcgagcaggagctgcttgtcctttttcccggttttcatctcatagtccatgacggcaagctgttcaataattaaacggagctcctcctctgaaaaaagccttgcttgatccatcgccagctttacccgaaatgggtgaacttttagattagaagcgatttgtttttgtccgtatccctgttccgcgaagtacttcgtctgcagaatcagccggaactgattcgaaataagcgccataattttgatcggttcttcattttgttttagcaaatcataaaaaatttgcagactctctgttcgttttcggttgacgattttattgatcagctcaaaaatattttgttcaaggcttctagcaacaagcatttttacatcatccagcgtaatttcttcacgatctccaataaacgtgcagagcttttgaatctcctgaaaaatcgatgacagatgaccgttcacaagcagaaccaaatgctccgccgcttccgtgccgattgttttctgctctgtttttgcaaggttgacagtaaagtctgtcgtttcctttgcatttaattccttcgcctccatcataaacgcgtgcttctttaacgctttcgtcagcttttttcgctcatcaagcttttcatacggagcaagcaggacaaagactgtgtaaggcgcaggtgattgtatatatgattcaagcgcactgacgttgtgctcaattttttcttttttcttttcacctgttaaaaaatatggatttttcacaatgacaagacgccgctcccccataaacggaaacgtttcagcatctgcaatcgcttgatccagcgggtcctcttccagatcaaaaacggatagattgaaatcctttgtctcctgatcaacgaccgtctgtctgatcctgctgacggtttcttgcagcagatatgtctcttttccgtataaacaataaactggatggacatctccttttttcaggcttttccacacatcaaataccattgttgtacgacttcctctctttcatcatccccttctatcctaaattgagtttgcaaaatagtaaagaggaagcctgactgctgcttccccatttatattaaacgcctgttcgcaagcccccgggacagcttgtaaaaaggcgataatcaccagaacagaaaacgttaccttagcttctagatttttcaaaacaattccattatacttaagtcagtcaggagggataaagttgaatgattttgaaaaaaacgttcaaagcaaacgaaatgatgctgtagattcagctgttggttttgttgtgtccttcggatttttcgccttcttgtttgtcatggcaacggttattcacctagttggttcataacagcgactgcccgggctgctgatttctcggcagtcttttttagttcgtctctgttatatctgatgtatcatatggaggatagacagaaaaggttccaactctgtttttgtatctatattggatcgttccgttttgatctgttcgcagcacgcggatagaatgtctctgtaatagttgcagaacttcttgatgaggatgatggtaccgattgtttttcccggctgagataatggccgttttcggctgaagctgttggatgaattcttcaccggtagagcctttgctcccatggtgccccacctttaagacatctgctttaatatttggaaacacgtccatcacctcctgttccccttctttctccaggtcacccgtcaagatccagctcataccgcccgtctccatccacagaacgagagaggaattatttttgcttgccggatcaggtgctccaggtgacagtacatggaactgcaaatcctttatttgcaatacatctcctcgcttcacctcttcaattgtcactccctcttctctggctgtctgcagcactttctcatctttaggttcagaaacgaaccctttcggaatcacgaggcgctttactttatgatgcttcagcagagtctccgcctctccgatatgatcttggtcagcgtgcgtcagaattaaagcgtcaagctgtttgattcccttagcagttaaaaacggaatcagcaccttttcccccagtgaaaacggatgctgtttttcgcgccaaggctctgacgagtaagacaaagtgccgccggtatcaattaagacacgcccccgctgatgcggagcacctacaaacatgctgtcaccctgtccaatatctatcatatccacttctccttcggaactaagacacggatatataaagagcagaaacagcaccgtgcagcaaatgcctccggttaccatcaactgcgacaaggagcgtttttcaatcgccataagcaataggatgatcgtgaccgtgaataaaaaaagcaaaacaggtgcaggatgtgcgatcataatcgtgaacacatcaacatctgcaatgtttgtgattagcctattggtccagcttatcaataaatcaaaccagctgaaaaacaatctcccaaacgaagcggaaagacttaatagaagaacacctgctacagctcccggcaaaatacagaaggtataaaatggtaccatcaacatattcatcggtacgctgatgatagaaaactgatgaaaatgatatagaagaatcggaagcgagcccagctgagcgatgagtgatacaattgtcagctgtcccaaggaggttttaacctgctgaaaaatagaagaggatagaattaaagaaaaactgacggcgaacgatagctgaaaaccggcttcaaagagatgataaggattgaagagcagaaggacgatgtatgaaaggcaaattgcagttgcagagtggacacgccatttgacaaggcttccagctaagtaaacacccgacatgagagcggcgcgtagcactgaaggagcagcgccggtcaacatcacatagagcggcagaaataacagcaacagaattgacgccttttctctagttataccaaggcgaatcatgatataaaacaaacctgctgtcaaaatccccacgtggagtcctgatattgccaagagatggacaacaccaagcttttgatacgcggtaagcacttcatcctccacataaaatctgtcaccaactgtaagtgcctgtacaatccctgctgaatcaggaggcaaaaggctgtttgtgaatgatatgatatgttttctcaagctgagcaccttgtacttaaaattttcaggttcgctgcagttttggatagacgtgacagagtagttccaatgaatatgctgccgataaagatactcgttataatcaaatgcacccggcacagttgcgtgattcggttcttccaatgtaccagtcaactcacatgacattcctggttctatgtataacagctgttctttttcaccagcagactgaatgcgatacgcagcagcccatttttccttatcaggtgtctcaaccatcatagacatacggtcgccgtcaattttgggaatagtgtcaatcactgccttgaattgataggttccctgccgataggaagagacattctgagaatctgtgactgcatacagtacaaaaaacaatataaaagagaagaaacaaacaataatgagaaaagcgtgcctcgttttgattaaaatgatgaggagaaagaggatgaaaagaaaaatagcggggaaataagcggcggcagtaattccaaccgttgccgaagctgccgccataggcaataacaaacgcgaattacgcattcatcacacgtagctcgtgaaaagtgtattcgcctgttcatgtatctttttcaattcttcctccgctaaaccggcatcggccaatttccctattagacccgctacaaatgaaagcttttccctgtttttcagatcaacgatcatttcatcgagttcaacctgttcaactgttacacccgcctgttcaaataattcctgcgcatacggatgtgttttgtaatcctcagcataataaaccgttttgataccagcttgaataatagatttgcagcattgaatgcacggataatgcgtcacataaatctcggctccatcagtcggcaccccaaacttagagcattgaagaatcgcattcatttcagcgtgaatcgttcttgcgcaatgatcatctatcattaagcatccttcatctgcacaatgtacaccgcccgcgattgacccgttgtagcctcctgctatcatgcgtttgtctctgactatagtagcgccgacagataatctcggacatgtgctgcgcagcgccaataaatggctttgagccataaaatattgattccatgaaattcgttccacgttgttccctccaaatgttgtgttgcctgacctttagtttacctatcataatgcatgaccgtcaaatcactttactgtaatggaagactttattttctcaaatgacttttcacctattcctgaaaccttagtgatatcttcaattgtttggaaacgcccgttttcttcccggtatgcaataatagcttcagctttggatggccccacccctgagatgccttgtaactcctctaaggttgctgtattgatattcaccagcggccccttccctccatcgctttggacagaccctccggtaccttgctgcactgctgtttcctctccctttttcgggatgtacaccactgtcccgtcctgaagaacctcggccaaatttacttgcgcttcgtctgcttgtttactggtcccgcctgctttctcaattgcctgagatactctgtcccctgttcgcatttcataaacgccaggatgctgaacagcacctttgatgtctatcacaattgtttcgcttgactcgtcgttgtttgcttcctgctttaccactgtattttctgtctctgttggtacagcttgcttcaccggctctttatttttccctgtggccagaaagatcataatagctgtgaaaacagccgcagaagccgctaaaataattgttttcttatgctgattcaaccaattcatcgtgcatgttccccgctttcgtcatattttattttcataacacatatggtttagaggataatagctcaaaggaggggaaaccattgaagataggctttatcggcacaggaaatatgggtacgatccttatcgaatcatttattgaatcaaaagcggccgatccctcaaacataacaatcacaaaccgcacaattgaaaaagcgttgcacataaaaaaccgctacaacagcatcaacgttaccgaaagtctcgaaaagctcgtttctgagaacgagatgatttttatttgtgttaagccgcttgatatatatcctttactggcaagagcgttaccttatttaagaaaagatcatattctcatttcaattacaagccccgttcaaaccgaacagctcgaacaatatgtgccgtgtcaagtggcgcgagtgatcccaagtattacgaacagagcgctggcaggtgtttctctcgtcactttcggcacaagctgcgacgaatctgcaaaaacgaaaatcaatgagctaatgcagcatatctctcatccgctgcaaattgaaagtgacatcacaagggttgcatcagacatcgtaagctgcggccccgcttttatgagctatctgattcagcggtttatagatgcagctgtcacggaaacatcagtatctaaacaggacgcgattttgatgtgtaaggaaatgcttgtcggaatgggaaaactgttagaaaccgaattgtataccttgcctgcattacaggaaaaggtttgcgttaaaggcggtgtaacaggagaaggcattaaagcgctggaaagcggtgtgcagaatatgtttcaccgggtatttcaaaatactcatatgaagtacgaggaggatatttccgcagtgaaaaagcagtttcatgtgtagacgagtatgtcatactttcgtctgtactgcaaaagcataaaaaagcattttaaaaaaccatcgttttaagaaacgatggtttttgatttctgcgccttgaaaaagaggcgttctgattgtgctgatggctcggtatccgtaaaatcagctgtcacgcgatggagctgaaagccgcagttcttaagcatttcttcgtattcttccaccgggaacgttctttgctcgtgtgtctcatcaaaacgatcatacgcttctccgttccacacaaaaaacgacatatcatgaatgacagaaagctcgtcacttccggcaaagctctgccaaatatagctgatatcttcgtcctggtcagcaaatgtgctatccggaaagacttccgcaattttataagatgaatgaacatcaaacagcaaaatgccttcaggctttaatacccgaaatacacttttaaaggtttcgatcacatcattttttgtttttaaataatttaatgagtcacagcatatcacaacagcgtcaaattgaccgtcaaagccggtaatctctctcatatcctgctgaagaaataaaataggctggctactcgataccttttgctgggcgaaagaaagcatctcttcgctgagatcgatgcctgtaacctcgaagcctttttcggcaagccggatggagatttcccccgtgccgcatgccagatcgagaatacggcctttttccgggagagatgcttcaatccattttgtccattgatcgtaaggcgcgtgtgacattaactcgtcatacacgcttgcaaagccctgataaatcattgattcattccaaagtcaagatctgcgagcggagcgtctccccacagcttttcaaggttgtagtagcttctttcatccttgtggaagacatggacaattacatcgcctagatcaacgagaacccatcttgcttcatcaaagccttccatctttttgacttgaatgccgttttcatcagcttgatccttgatttcacgggcaatagcctgtacctgtttatctgaatttccgtggcagatcagaaaataatcagcaaccagagaaataccttccatatccagtgctaaaatatcctctgcccgtttatcatcgcaagccgcagctgcgatctttaaaatggacttttggttcattcacaaattcctcctgttcagctgccagacacaagccagttatacgttaaaaatgtgtctggaaaaaccggttgattttttttcataagaaaaaccattgtatttttaatggactgaatcagcgcttgattcaaatctgtctcagcaagcttacgcacctcatcgacaccgggaaatgcccggtttggctcaatgtaatcggcaacgtaaatgactttttctaaaagtgtcatgccggggcgccctgaggtatgatacctaatggcgtcaagaatgtcttcatcttgaacccctgcctctctttggaccaaataagcgccgaccggagcgtgccagagctccggattatgatccaataaatgcgcaggcattttttcacgcgcaataatttgtttcatttcttctttcgggcggaatttggcgtaatcatgaaagattgccgctgtttccgcttttttagaatcggctccaaaacgctccgcaagttcgatcgccgtgttcatcacgccaaccgtatggatatatcggtgttcggtcaattgctgcttcacgcatgcaagtgcctcctcacgattcatataaaccattctcctctacatacttcttcactttatcagggattaagtagtcagtgggcttcttgcttttaaaccgttcccttatcatagttgatgatacctcaaattccggaacgtctgcaaagagaagcggataaggggtttcaacatgaaaaccggggcgctttactccaataaattgaatgaggttcagcagctcgtccagcttataccatttcggcaaatattcaatcatatcagcgccgataataaagaacagctgatcatttggataacgctgcttcagtaaagaaacggtatcaaaggtatatgatggcccttctctttccatttcaacaagctccagcttaaaggacggattagattgaattgcaagctttagcatttccacgcgatgaaagctgtcggtatagtcttcgttctgtttatgcggcggaatttgattaggcataaaccaaatttcatcaagccccgcctggtacagcacctcattcgccattaagaggtgaccattatgcggagggtcaaacgtgcctccgaaaattccgattttcttcatttcaaccacctttaaggaagctcgatttgtttattttcctttgattccttatataacacaatcgtattgccgattgtctgcaccaattgagagcggcttccttttacaagagcttccgctacatcgtttttatcctcttcgcaattctgaagcacgctgactttaatcagctctctcgcttcaagcgcctcagtaatttgtttaatcatgttgtcgtttactccgcctttacctacttgaaaaatcggcgttaaatgatgcgcttttgaacgcaaaaaacgtttttgtttacctgttaacattctgttcctcctaattttcctattacaatagatctcattttttcaatatcaggctcttgtccagtccacaattggaaagacaatgctgcctgttcaacaaacatgcccacaccatcgagtgttttcaagcctttttggcttgcttcttttaaaagggccgtctgtattggattatacacgatatcacatacgacggcactgctcgcggcacgctgtaatgaaagcggcacatcgtccacgttcggatacatgcccacagacgttgtatggatgataacatcatactgctcaagacgttcttctgcttcttttatgcttaatacttctttattgtgaaacgagggagtagcttctgtaagccgctttgctttttctaacgtccggttgcaaatgtcaaattttttcggggtatttcggacaattgttgtaaaaatggctctcgccgctccgccagcgccgatcattaagaatgacagttcagagatgggcttgtctaataccttcattaatgacttcacgaagccttccccatcggtattgtatccgacaagcttatctccctctcttctgaccgtgtttacggcaccgagcacttttgcactctcatcaatatgatccagataatccataatggaaaccttgtgcggaacagtcacattgattccttgtacgcctagagctcttattccttttaccgcatcctccagatcattctcttctaccttgaaggcatgataatgtccgtcaagcccgaggtctttcaatgatgcgttatgaatatcaggtgacatagaatggccaatcggatttccgataaccccgtacagctttttcatactcctctccccttttcttaaattaatgaacgccgaacaaatacatgaacgccttttggcgcgtatgcagttacctttttatcggcgtcatggacagtaacccagcctaacccagagaaaacgatatctgtctttttgtcttttatcgtaaacgtatgggcgaccaattccggaaactcatccatttcatctttacccggaggtgtgagcaattcccctgcatgcttttcataaagcgcgtctgcattttcaagttttgttctatgaatcatcagttcattcggcatatagcaaataaaaggagatctttccccagacacataatcaaaccttgcaagtccgccaaaatacagtgtttgctgatcattaagctggaatgtgcgaggcttcagctcctttttaggagataatattttcagatcctttttattgacataatgcgccatttgatggttgttgataattcccggtgtatcataaagcgatgaaccgtcatccagcgggatttcaatcgcatcaagggttgtgccaggaaattgggatgttgtaataatatcttcttcacctgacacttctttaataatccggttaataaaggttgactttcctacatttgtacatccgacaacatagacgtcttttccgttgcggtaatgctcaatcgcgtcaattacttctctgattccctggccgcgtcccgcactgaccaaaaatacgtcaaccggttttaagccaagctctttcgcttcacgcttcatccattggatcagacgctctcttttcagtgacttaggcaaaatatccgctttattgccaactaataagatagggtttccccccaccaagcgctgcagcccattaatccagctgccgttaaaatcaaaaatatcaacaatttttacgacaagagagtccgtttctccaataccgtgaagaatgttcaaaaaatcatcatcagttaaggagacatcttgtatttcattatagtttttcagtctgaagcaacgctggcaaatcacattttctttcgtaagcgatgcaggcggcgcgtaccccaaacctgttttgtcctcggtttggatcgtaactccgcacccgatacaaacaaccttttccatttcttactcctcccactgaatgtgcccttttcgtttgagagcactcagtattctgcgttcgacctggcggttaaagcgcgtaatgaatccgtcagaggaagcgactggcacgaccaaaatcgtatggtagccgtttcggtttcccccgagtacatcggtcagcagctggtctccgatgacaacgcagtcctcttttttcagctccatattgcgcaccgctctattaaaggctttacccatcggttttcttgctttatagatgaatgggattccaagcggttctgagaaaagtttcactcttctttcgttattattagagacaattgtcactttaatgccgtgttccttcatttcttcaaaccactcgatcaatcgcggcgtcgcgttcggcctgtcccattcaacaagcgtattatccaggtcagtaataatcccttttacatttcgttcctttaatttctcaggtgtaatatgaaaaatattttttacaaactcgtcaggtaaaaaaaacttttttaacaaaacccgcacccttccctttttctttctttcaaaatgattgtcgaaaaaaatcgaacttgcgcctaaagaaaaactgagcaaaaaaatttcgacaaaaattgggtttcttcaccaggtgtggataaatttacacacactatccactcttattacatcactctttagacaaattataaacacgatactcacaagttatccactttttggtgtggataacagaacgattgttcttatatgcatttcatggtagattaaagataacttcaacctcagatgaacgcaacttatcattgtatgcgttaaaatcatgaatgattccaacttttaaggaggtgcctctcccattaattgggttcctagcatgagaaaactgtctgatgaattactaatagaatcttatttcaaagccaccgaaatgaatttaaaccgtgactttatcgagttaattgaaaacgaaataaaaagaagatcgctcggacatattatttccgtatcttcttaataggaatttgtctattttttccgggcgtatttcctttttttactcagatgactgatattatatcactttggctgcgcgctttactactattttcagcaaaaaacacccctaaaaagaggtgttttaaagggccggttattatgctaaccagtatatgccgcccacaacaaggagaacaacaactaaaacaacaataaaagcgtatccatatgctctgcctgcgccatacatgtgaagcgcctccttaataaggttttataacagcctatgtaggagaaataaatcggactaggcggttgtccggctcaacgctgcaggatctgcccatcttgtattccttcatatacgatccttgcccctttaggtgtcatatgatttccagaaggatctataagaccagattggataagcgcttcatcagttgcttttccgccgtctgcttctataaaatgcttccagttatctacaagagggacatccaggcgcttcgacacatctcttgtaatatcgttatatgagttgtgccatttccttgctccgccttttggttcaaaagcagctgcttgatatctggaatagtaaaacaaatgatgcttcccattaccttctataattgggatacacgtcattaagattggcttgatcccgtgttttctgctttcttcaataaaataaaccagattttctctaaaacgctgcttcgacactctcggtttcccctcagtcagtatggcagcgtcattggtgccgaacataataaacaaatacttcggtttttgatccagcacatctgtctgaaatcggagacgggcatcctctgtcgtctgtccgccgattcccgcattgagtatatcaaggttaccgcgctcagctgtttttaatatattgacccactgctgtgcttttggataatcgcgataatcccaattagagccacgcgtattgctgtcaccaaatgctacaacgtcttcgtatccccttccctcgcatcctgctgtaacgaacagcagaaggaaaaggatgataaaatgtttcatctttacacccccaaaagcctcaccttaatgttatacctctgtttctcttcgttcaatgaagagtttttcgctatcactgttttttcctatagttaacgtgtccccctcagtgaatatcattctgctttcattgcggcgcagctgatgattttttaaaattcccttctttccaatctgaaaaacacacaaaccaaagaaaagaaaataacctaaatccgcactggaaacaggttatccgttaaatcctgcatttactttaacttcgatttaagcttggcctttgtttttggcccataaatcccgtctgcagttaatccgttcatgagctgaaaacgcttgacggcattcgctgttttcggtccgtaaactccatctatgccattgtttttggctcccttatcagggtaaaagtgaagtgcagttaaagccttttgcagctggagaatgtttgtgccctttcgataaggcgaagtgagctttataaccccagacggcagaggatatgatggtaaaggttcttttggaggtgtatccgaggaagaaattccgtttataaaagagttccagtggttcaagagtttccgcggacattctttcccagaccattttttgtggggaacaacacgatgtaacggaatattgttttccttcatcagctttctgatcagccactgggcatttgatgttgctttttcaaaatcgccatcagcattttcgcagatttcaatcccgatcgatttgcggtttcctgtcccgtttgtaccgtctcccgcatgccagccgttttcatctatcgggagatgctgataaatgactgaatcgtcaactgtaaaatgccagctttcggatgtgctcgggttttttacaaaattggcgtgcattttcgcatcagcgccttttgctgtattcgctgtattatgcaccgtaatataagcaggcgtcatcgcatagccaggacgattatcatttgataccggtataaaatccttttttatggttaccatttctatccctccctattattaagaatgcagaaaacagagagatggacagccttttttatgaggtaaaaaagaattgtgttctcaacctggttttcagttgaaccgctgaaatggcaccagttatactaatttagatgacggaggttttggctcctgacatcacctaagttgggagtgaccatagacatgttaaaaaaagtaataggtatacttgtgattatcgctatcattgcagtcggtttttttcagaaagaagcttggcttgatgcaatcaaagcaggagggatgttttccgttttatttagtatgctgctgattgctgccgatgtttttttcccaatagtgccgtttgctttggttgctgctttaaatggcgcagtgttcgggactgcaaatggaatttggattacactgaccggctcaatgcttggtacaatattgctgttttttctcgccaggtacagttttagagattgggccagaaaaaaagttcaggcctatcctgccatacaaagctacgaggcttccttcaacaaaaacgcttttaccgctgttttattaggaaggctgatacctgtcataccttcacttgtaatgaacgtgatctgcgggctgagccaggttcgctggcatgtttttttctttgcgtctttaatagggaaaatccccaatattgttgttgtcactattgcaggtgccaatttcaccagcaataaattattgtctatcagcatttacggtgcatatattctgatcatcatgctggtcatttataaaaagttccctcatcttctgaaggtgccaaaaaaataaggaggcttgttggcccccttactttttttctgtcgcatggcctccaaattcatttcgaagcgcagcgaccacctttcctgtaaacgtatcgtctgttaaagaacggtatctcatcatcagtgacatggcgatgaccggagttgccgtctgcagatcaagcgcggtttccaccgtccattttccttcacctgaggaatgcataatgcccttgatctgatccagtttcgcatccttagcgaaagctcgctcagtcagtcccataagccaagaacgaatgacagaaccatgattccacactctggcaaccttctcgtagtcaaaatcaaattggctgttttcaagcacttcgaatccttcaccaatcgcggccatcattccatactcaattccattatggatcatttttaaaaaatgtccgcttcccgcttcaccagcgtatagataaccattttcgacggcagtatcacgaaaaagcggttccacaatctcccatgcttcatgatcgcccccaccataaaacaggctccatgccgtgcgccttccattccgcccgacgttccggcatcgagataatggatacccgcttctttcatttgattgtagcggcgaattgattctttataatgagagtttccagcttcgataatcatatcgcctttacttaataaaggtgatacatcacgcaaaacagcatcgacaatgccatgcggtaccataacccataggatacgcggcgggtctaataaagaaattaactctttaagattcgttgtcccctcagccccgtatgctttcagttcatcaacagccgcttgatttacatcatatccaaccgcttgatgattgcggtcaatgaattgctttcctatgtttatgcccattttccctaagccgattaatccaattttcatatctgttcctcctgattgtctaaaaagcctttactctttatgttccctttggattgtattgtgatacgcagaaaacaaatggggcttacatcgtctgcgcatgtaaattttatttttcatgactgactgtgcctgccagttctattactgaatctctttatatccataattatcactttatccttgatttaccatcagtttaagttaaaatatgggaaggtattcgatttttttagtaaaaagaaggtgacatgttgcagaatcaatctcatactcttatcggagttacgaaaaccgctgtattctttttatacgctgcacttgcaatcatcggttttgcaatcgggtattttattccgcagattgcgaaatgggcattatccctcccctggatccctcttgaaggaccacttcggctcattacctcttttcagggatctacagcttcatttatcactgctcttctcggtatgtgtgcggggatttggttcgctcattctgttattgcaatgctgctgtctgtcaaaattacagatcacacagtggaattcatcaaaggaaaaaaagtgcaaacaattcattccgatgacatcgctcttgtatttatggatcacaaacggcttgtcctcctgggaacagccggatatgaattggtacgggaagaaattgatgaaaaaccagtaaacgttgagaaggcctttagacagcatcattacgaatgggcaacagatggtgatccgtttaaagatcaatttcgccgatggattcctgatgcaccagacctatcgcaaggcgcccatgccttattaaaagctcgtcacaaagcactgcaggacgaagaaaaagacgatattgaagaattccgtctcgaactggcacagctgggcatcgttgtacgggacgaaggcacacgccaatattggcgaaaagcagaaacctatcccccgaaaattcagctcggcgaaggattgtaacaacagaggctcaagaaagagcctcttctttattactgcacaataaacagcactctggtgccgtcagggtagctgctcatttgattccctacccacgagccggcgccgcgattatcagaaggcgtcacatatcggacatcagcccctgcaccgccttcctcgcagaccgccatcggccactcatcccggtcatagcccggcttggtcgggattccctttaaagattcctcccgccttttgtctgctccatctctgtcaatggtacaaatatctggatgtccctctgcaatcgcatccctaatatgactgccggtttccggataacgagacagcggaaaatataacactttgtcatacgaagatgcgccttggatctgttgcggaaccattaaacaaagaagaactgctgcagcaagaaacaggcctgccatccattttttcattcccatccccccatacctttgttcatttcaatgtatgggcgcttgatgaagaatatttttaacatttgaagttagtatgctgcttaccaaagccggactcccccgcgagaaatttcccggtacagacacagacagcctcccggtcacatacatttacatataggcttttgcctacatacttttgtggaggtgacgatggtgacaggtgttttcgcagcgctcggctttgttgttaaagagcttgtctttttagtatcttacgtgaaaaacaatgcctttccacaaccgctctcaagcagcgaagaaaaaaaatacttagagctcatggctaaaggggatgaacatgccagaaacatgctgattgagcataatcttcgcttggtcgcccatattgtgaaaaaatttgaaaatacaggtgaggatgcagaggacttaatctccatcggaacgatcgggctgataaaaggaattgaaagctattccgctggtaaagggacaaagctggcgacgtatgctgcgaggtgtattgaaaatgagattgtaattacaaaagggggtgcatactcctctttaatacgtttaaatatattcggtgatctcttctcctctcttggtttattattgaaacggaaacaaaaatccattacactattgctgatgcaccaacgggtgggaggactcgccatgaacaaaaaagaactgctcctaatgaatttcaaggacttgtttaacaagatggcttggcttaataagccaaagatggaagtctgtcttaaagggtataagccttctgaagtacattgtatagaatccattgaacatggaaatactaatgtgacaaaactagctgagtccctttatatgacgagggggccataagtaaaatgactaaaaagcttatagaaaaaggcttaattgaaagctaccagaagccagataacaagaaagaaattcattttaggcttaccgagcaagggaaaaaaatttataaaatccatgatgaactgcacaaagagtttctagagcgcgacaaggcagtatttgaacaagtaaccgaggaacaatttgactttatgattaactttgcggaaaagtataatagacatttggatgtagaaataaaaaaacaaggttttgatattaagtcggaataaatttaaataatgaaaatgcaaccacaggcagccaactctattgagtttcggctgcctttttattaccgtcattttgttgacgaggaaacaaaattatgttattttttgttgactgggaaacaaaaaatacaacttttgagaggtgaataatatgttaaaagacaaagtaaaggagccaggattaccaaaagaaatcctcatggcttcctgggccattgcacttggagcaattgccccaatgcttgactcaactatggtgaacattgccatcgacaaattaaataaggatttcagtacgacgttggataccattcaatggtccattacaggttatgttttagctcttgctattgcagttccagtatccggatggcttatgaacaaatttaatggaaagaaaatcttaatcggcgcagtcattgcctttggtgtaacttctgtttttgctggaattagttgggatgtttctagctttatcttattccgtttgcttcaaggatttagcgctgggattattactccgctcatgtcaacactcttggttaaaacagcaggtccagagaatataggaaaagttatggctatcgtcagcacacctatgattttgggcccaatcttaggacctgtaatcgggggcttcatcgttcaagctacatcatggcattggattttcttcatcaacgtgttcatcgttttgattgctgcaccactgatgatgaaaactcttccagactttgagccattcaacaaaaatagtaaacttgatatttttggaattatcaatctatccttaatgagtgcagcaatgatatacggaattacaaaagcagcagaccatgcatcatttaacaatagcgaaacaatcctatgggtgggcatcggcctctctttagctgtaatttacatcgtatataatcgaatcagaaaaaatcaaaccgtactccctttaaatttgtttgcacacaagaacttcttagcatccagcgtcgggttattattagcgaatattgccgtcatgggacccatgttaatacttccattgttctttcaaaacttccgtcatttcacggcaatcgaagctgcgcttgcattaatccctcaaggagttgggatgctcgttactcggccaatgattggaaaaatgattgataagatcggtgcaaaatacgtggttattgtcagtctcgtcctttcgcttatcggatctattccgcttatctttatcaccgataaaacaagtatgatttggatttctatcatattattcatccgcgggaccagttttggaggaattatgcttccgttaacaagtgatgcttatacaggacttgacagcaaacaacttccagaagcaggtgtcggtattaatattattgaaaacctcggtgcaagttttggttcagctgttatcgcaactgttgtcgcaactactatacaaggattgcaaccaacgattgcgaatggcttaaaaggttaccatgccggattcttagtatccaccattgtccttgcggtaatcttcatcccaagtctatttctcacacataaaaagaatgcacaataaagaaatctgcatactcgactgccgaacggtttgtttggataacttgtgatacatgtgatgtgcaccagtttcataagcccatttagaaaggcgcttactaatttgattggctatctgttttcttcgatgtctggatctacttcagaggtttcaattacaaaaagagggcaataaccctctttaatacgtttcaatatatatagtgtcagaatccacaacggtaacttctttcacgataaagttaacaattgtttttttatcatcaagggttaagttatctgcaccgattgattgaaaatagtcgatggctctttttagagcattttcacttgagctcgtatcatccaggactttcatttttgattgaatttcgctacacttttcagtaagctggttttgctttttttgcagctcaataatttgcgctttgatttcatctatgtctaaatcatcgtcatcgcttaggctgattagcgttaaaagacgcttgcggcctttttttgttttctctatctctttttgaataagttctaattcatcagacaggtgatttgattgttcaatctctttgaaagaagcatacttttgaggatttgtgatgaatttaaaaatttcaccccatacatgccggttcaatttattctcagacatttcctttccgcagccgcggtcctttgcgccagaataatttttccggcaagtatatacatagtagtctttaccatgtgattttcttttcttccctgtcatggtatttccgcatttcccgcatctaaccaaacccgataacaagtaattgtgagggctaatgcttaagtgttttcttttactttgacctaagagttcttgagcataatcccattgttcagctggaacaattgctggaattgccacagtgatttgctcctcttcaggccttattttgattatagatttgttccctgcctgttttgaaacataggaaccctctgtatcatatttatactgtttatgttcacccttataagaagagttcattaatatctgtcgaacaacctgcctgtgccatactttggcacctttttttgttttaacccccatctgagttaaatgtagagcaataccatttactctgccgaaaaaagggcttttatgatcggtgaaatagttaaaaatcatcctaatgatttttgcttcctcttcaaaaatctcaagagttcttttctctttaacaaatttatagccatatagtttggaatctttaataatcatgccttttttcattttttgaagtcggccgcttgatgtccgttctttgattttggctttttcaaattctgagattgctccacgcattgcgaaaaataattgaccttctggagaattggcgtattcaccatttacaaataccaagggtatatttcgctttcgcaattcgtcatcaatgataagctgattcattaatttccgagaaagacggtcaggatcataacaaatgacttgacttataagtcccttgcttgcatcctccctcaagcgattcaaagccggacgttctaaaagctccccagaaaatccttcatcggcatacttcagcacatccttagtccctgctttctttatacaggcctcgatctggctgtcgatgctcgatcccttgatcgcttgttcctcggtcgatacccttacatatattgctatcaccctggatctccttcctataaagttttattaaataatgatagcaatcgttaatgcatttgtcagcttgcggtccctcgatgattatcaccttcataaaatgcatcaccccttgggtaatgctatgtaaaggcggtttgtcctaatgaaatcattttcaatgagtgtgaaaaaagcacttaaaaaaccgatagttaaaacgatcggtttttcgacatcgcctaggccctcaacatagtaaattcatatcattagttatgaaagcttattttcactacactccttatatttaattgccatcatttctatacgatttatatgaaatatggtaaaaaatggttagctaaaacgataaagataccaacctgttcatttggtatccccattcttcaagtacctcaataaatgtaaaccactgaatatttttatgacattgcacgtgtcaatgatgccaattcatgaactcataaaggagatttaataaaactcccaaaacaaaagggatatcaatatagttggtatcttctttattagtttgaatccctcaataaagtggatgcttatcataattacaaaaaactttatttgaagcactgaagtcattcattatattgttgtaaagataacactatagtccccttcttacttcataaacggttgttatatttaacttcttaattaagggacattttctgtttttagattcgttatgtctttttctgttacgtaaagaatggagataaaccaatagaattaagtgagctttaaatgcttcaaaaagctctgataacaaatctctttataatattcatgtgaatttatatcttcactcattagccattgaatgagcaatccatctacaatagatcgcattgtttttgaagctttttcaacatctatactttggtcaaatacgcctgtttcctgtccgaaaataataatgttagatgtggtgccccagcactgttgataaaagctatggttaattttcctgtacgtttcatttcgggttgcctgagacaagaaatctaaataaaccttataaaacttttcattttcctcgggagagacaaatattgaatttacataagctttcaacttatctagtggcgtagattccgaatccactgcttccaattcatgtttataaattttatttgtaagccactcaagtagttgagaaagggtatcttccttattatcaaagtaataatgcacgacgcccttactaactcctgcgtgatctgcaatactttgtagtgtaactgaattataaccttgtgttgacacagcttggaaagctgcccttaatatctgattctttctttcttctgcttttttcttcataataaacctccagaaagctaaaccttcaattagtatacaacagttcatgaaatccacacaaaattattccgaccagacaaaatagtttgaccggtcagaataatttagtatactaaaagtggtttcacatcaagatagcatataggaggatttataaaatgaaagacgaattcaaggctctagttgtaaacaaagttgatgatgaattttcaattaaagtaaagaatgtttctccagcgtttttaccagaaagtgatgtccacatccaagtacactactctggaattaactacaaagatggacttgcagggaaccccaatgggaaaatcgtaagaaaatacccatttataccgggtatagatttagcaggtgtagtcatttcttctaatgatcctcgctttaaagagggggataaggtgattgccacaagttatgatataggtgtttctcattttggcggttttagcgaatatgcaagtctccctggagactggattgtacctttacctgataatttgaccctcaaagaagcaatgatagtaggaacagctggcttcacagcggcactatctattcaacgtctagaagaaaataacctatctcccgaaaaaggaaaagttctggtaacaggagcaacaggtggcgttggtagttttgctgtttcattccttaactctctcggttatcaagtagaagctagtacaggtaaagaatcagaatatgattacttacgaaaacttggagctagtacaattatttcacgggatatgacctatggagggaaggttaaagccttaggatcacaaaaatgggcggcagctgttgatcctgtaggcggggaacctcttgcctctatcttaagccaaattcaatatggaggttccgttgctgttagtggattaacagctggaacaaaactgccaactactgtttttccattcatcttaagaggtgttaatttacttggaattgattctgtatattgtccaatggaaacacggttaaaaacatgggatcgtgtagcaacagattttaaaccatctaatttaaaggaatttatatcacaagaaattactttagatcaacttcctaacgttcttcctgaaatattggaaggacaagtaagagggagaacgattgtaaatatcgtatgattattcatcagaactcatccagttgctaaagatgaaacaatgtcttaaaggtctagtaaagggattctcaacaggaattcctttacttattatagcttactttatgttaatgcaaaaatataaggagtgatcctccccattcagcttacacagtcttaatgatatgaaaacgcttattcatcgtacattataaatgtggctcctagtctggagtttcgttatgggcaaacaaaactcaaataaataggaacccaccttgtcacaataaactcaatagactaatgctgagaagtctccttacttacttcaacatgctcaaaaccctgtaaacaggttcccttggggagaagaaacatttgaaaaagcgaaacgcgaaaacaaacctgttctcgtatctattgggtatagctagctcgggtagctatacgcacatgtcattggtgccatgtttcttaaaataaccacaaaaggcaaccagtttcggctgccttttaataattttattggaaatttttagaaagctagattcaaaaactttttctcttctaatttaaatactgttgttttttcttttgattcattccattttatcttgccctctaatttgtgtcacttaatatcttcctcgggcatataatcaaaagttgaaacgtgattggtttttttcccaccgtctacaaaccgcgagttctgctgattaagaaatggaaagataaaaagctagatcaaatcatagaaacaccttattattgcctttcaaaatcctctgcataaatgaactcaactttttgactgctctcttcgtattccccttaaaatttaataatcactttcccttttggccgtccatttgcgactagttctagcgcttcatttacgttgtctatggtaaatagtgttggatgaattgctggaacaatgttgttttcttcaatgattttagtaatctctttaagttgtgcaccgtcagaacgaacgaagataaaatagtatcctacgttttgtttcttggctttgcgatcatactttgcgcccgcaagggaaaatagcatttgtttccacaatggaaaatttcggtcttttccgaagcgtttatttggtcctgtacggagagagagcaatcttccgcccgatttgatgatactcaattcactgtcaaattctttaggtcccagtgtatcaatcacgtaatccacattcgacaacaagtcaacatagttttctgttgtataatccaaatattggtctgcacccatttccaaagtgcgttcgcgcgcctctgagctgccgctaacaatgacatttaggcccattgcctttgcgattggtacagccatttgaccaaagctgcctgatccacctggaatgaagacagatttacctggctgtgcctcaagttcttcatgcaggccttgatacgctgtgagtccagccagtggtgcagcagcggcttccacgtaagacaaattttttggcatgggtgcaattgcggcagcgtcaattgcggcatattccgcaaaagcaccaattttttcgagggggagacgtgtatagatggcatctcctacgtgaaattctgttacattttttccgactttttcgataactcctgtcaattcattaccaagcgttaatgggaattcataatcttgaatcagtttcacgctgcctgtaattattaacatttctagtggattgactgccgcagctttgacctttaccaagacttcgttttcatcgatttctggaattggaatgtcattgactttggcatggatattttttgaatacttggtgatctgagctgctttcatgagtgttttcatatttttatcagcatcctctatcatattacatttattaggtttttacctttttatataatcgtttaggtggaggggaatcttactttaagcgaagtctgacttccaattttatgattaacccgccacctaaacattcgtgatttttagaacgatcattctcaaatgattaaattttttaggtccgatactgtaaataaatgtttctcatcttcctagtgttattgatatagaacatcgttattatatagatttaataacttgaaagattacatctctagaatcggatagatttgatctcttaattgaaattcatagttttcgtctacaattcctactacttgattactatcataaagctccatcataaaactcgccacttgctcaactgtgtggtacatcgggatatttgctttgtaatcaaattctgtcgtatcagatgcatttttcatgaattctgtttccgtgattgctggtgctaaaactttcaccttcattttcgcacctttgcgttccagttcttttgcaagcccttctgtaaatgcactaacaaagtatttagatgcagaataagtaatactgccaacagcaattgcatatccgagggctgatgatacgttaattaactgagttccctctacatccgaataatcacgtacaaatagtgtagaaagaattgttaaggattctacgttgacacgtaacatggtttccactttatctaaattctgatccgtgacagaagaagattcaccaagcccggcattattaatccaagtctcaatttgatattcctttaaattatcatacagtgtgtatgcctgagctgtgacagataagtcacatgtacgaatcataacatccaaatcgggattaatattctgaattgttgatttaagctcttctaatttatctaatcttctagctacaataattaagtttttgccgcgagcagctaacgctaatgctgtctcatatcctatacctgagcttgctcctgtaataactgtatacttcatattattctctcctcgaaaacaaatttttttttattagatcatccatataacaaaatagattcagtctaatgtcgacaaagtcaaatcaataatgttttctaatttttcctcatcatttgtcgtttttgctaatactcgtatccctacgagtgaattatgaataaattgagaaagccctttgatatcatagtgtttagaaatttctccttgttcttgaccatgtttcagtagatcaaataagaaggtttctgtctttataaaagtctctgtaacttttttagtaaacgatttattccattacgagatcttggctagatgacagatcataatcaactgccactacactcctggtcaccctcaattaggtcaatgccctgttctttgctgtgtggatctgaccatacgggtcaccattttgcgcggcatcaaccgtggaaggaatgccatgaatcggtttcgagccccgggcattattaacgtcttgccacgtaagaagcctcggtacccttcctcagccacctgcccggcctccatgatagcaccactctggaacaacttcgattcaccaatacccgaacgatcaacgaagccggttgacgtcagtcccggacatagagccgtcacagtcacccctgtaccgctcagttcgttctccaaagcctcggtgaacgacagcacgtacgccttcgttgcgtagtaaaccgacatcataggtcccgggaagaaagccaccaacgaagccacattcatcacgcctccttggccccgtttgaccatatccggcaagaacagtttcgtcataacagtcagagccttgatattgacgtcaatcatattcgtctcttgttctaactgcgtctccaagaacgtcccgtacaaaccgaagccggcattattgacaagatagtcgacgacgatccccttctccttgagctccgcaaaaatctcctccggcacaccgggtgacgccacatccttggcgatgaccgtcgcttgactgccatatcttttccgatattccttcgcgagctccaaaagcttaccctcgctacgcgccaccagcaccaaattatatcctcccttggcgaaacgatccgccaactctttgccaatcccacccgataccccggtgataagaacagtttttttcatttgacagcacacctccatttttagtttgaacttttaaaacgttttacagcgtttcttactgcgagtttttactatggatgtatgttatccataattcaaatttttgtatcaagaggatttatacttgccgcatatatctcaactaagacctcgccattatttattttgggcctagggaagtaaaaatttggtttttcgccgtagttttcaatcgctaaagctttcgttacaatcctccacatttttatttaacgcacatgtatcttttcctaacgaacctaagaaaaaagaatatgaatatcccttccctagatgggatattcatattaaataaattattttaagaaaggataatctgtataaccttcttttcctcctgcatagagcgtgttttgatcaggttcgtttaggggagcacctgatttaatccgttctgcaaagtctggattagctagtacccaagtgcctactgtgacaacatctgcaagattattatctacatcagacgaaagttgatctagaggacgacctggacggttaacaagaagtgcttgatcccaaagttgacgcacatcttttaggaattgctcgtttccaaagtgcattaaatgcagatatacaaggttaagcttatttaattcacttattaaatagcgatacatctcaaggctattttccccttcatcaatgccttgcagtgttccttgaggagaaaaacggatgcctgttctttctgctcctatttcatcaacaactgctttagctacttcaattgcgaatcgagaacgcccctcaatcgtaccaccgtatgcatcttgacgatgattggagttttcactaaggaattgttggatcagataaccattcgctccgtgaatttcaactccgtctgcaccagcttcaattgctgaacgtgctgctaaacgaaactcattgataacatcttttatctcaagctcactcagttctcttggtgttgggacttctttcattccttctgccgtgaaaatttctacaccaggtgcaatagctgacggtgcaactgcttggcggtggtgaggtgtgttatcagggtgtgatatacgtcccacatgcataagctgaataaaaatatgaccgccttcactatgaactttagaagttacttttttccaccctctaatatgattttctgtataaataccaggtgtattagtgtaaccttgcccatcatctgaaggttgggttccttcgcttataattaaaccgactgaagcacgctgaccatagtactctgctactaaatcgctcggcgtaccatctggtaaagctctatttctagtcatcggagccatacctatacgatttttcaagtcaatgtttccaatacgaactttttcaaataatctgctcatatgaatactcctttttaataaaaattagaatcaagaaataaatttacgtgttctgcaaatagttctggaaattgaaacagatgcccgtgaccagaatcaggatatataatcagctgtgctttgggtaatttctctgctaagatgtaactgtttttagttggtaccattacatcattaacaccattagtaacaagtacagggtgtttgatgttttgtaaccattcataatcatgattagatttttgtttagcccattttgcaatggcttgtaattgtgcctcttttacttgttctgaactgtttacttttttctgattaaaaattctttgtagtgaagccattcctgcagatttacttgtttcggtttgtgcgtagaaaaagaacataaaatcatttattccatcttcttccgttccgccgtgacgattcattctttcaaaaatctctggatttggattaataccagattcaggcgaagtacctgccataataatttttcttactaaatctccttcttgtaaagctagctcttgtgcaaccataccaccaatggaaaaaccaagaatgtcaacttgttctaatccaagagcttttataaatgttgctgtatcttttgccatatcagtaattgtagtaggcgttattccatctgtctcaccaacccctttattgtcaaataagattactgggcgtttatttgcaatcggttcaagcatgtctggatcccagttttccatcgttcctctaaagtgaacaagaaatactagcggtataccatcttgtgtaccaaattttctatatgcgtaacgagttccatctgcttcaataaattctgattctgatggtattttaaagtttgtcatttttgtgttcctccttagaaattaaaaaacgattttataagtatgcattatgatggtttgtttcatgctaattttagaatgaacgttctaaatagggtaaaaaaaagaaagctagtccaacactgaaagtgctagagtaatgatgccttctaattcttttttactgtaattagtttttattagtactcttatacctaccaaattgttgtgtaagaaacgagatatgttatcagaatcgatttcttttgatatctctccactagtttggccccgttttataaggttattaaacatatcttcagtacggttaaacatttttgtaactatgcgtccaatttctttgtccaacaaagataattcaatggctgcatttactgatagacaaccttttgggtattgttcaatggaattcagtacgaaaataaaaacatcacgtatcgcctgtttaatggatgaagttctgctaattatgctttccatctcattgacgacgagctcttcatagtgattaagggaagctaaaaacaatgaacgcttgtcaccaaatgtgtcatatatactcctgcggtgtatccccatatgatttaccaaatcttgcatggatgttttttcataaccctgttcccagaaaagctccattgcttttcttaatactgctttttcgtcaaactctttacttctagccatttttttctccttaaaaaaatcaatgaaccaatactaacaaaaacaaaagtcataatccattgtagaatgaacattctaaaatgaactcatgaatttcaaaccatgattaaataatatcctttttagaacgataagtaaagaattataaatttaattatcaataatctctggaacaatgtgcattctcatttgagtagcaaaacagttagatctaacgtgtttcaagtatagcaaatttgagaacgatcggtaaagaatttataattaatcatgtgttttatatggctatgcgtagcctgaatttttatgaatatcgttccattttatctctactcaaatcagttctgcaatgtcactggtggcataggatcttttttatattagatgcacacaacaacttcatccaaatacaaaaaacgaatgggaactatatactagttgtttttttatttacagtctaaacaaagtaaaggaagtattacttgaataacttcttttctccaaacgatagctagccttggcctattctaaagaacattgtcatttttgcaaattaggaaactaatttatcatagctagccttcaattaaacgttttaacttaaactcagtttcagtatcctcaactggagtatagacgctgcatcttaaatcagtatccccatgcacttgtaatgaagtaagattaaacaacattttacctaccttagcatgacgaaactcaattaatacttcaggagcagagcttatctcattttcgttccaaattttacgaaactcaggatatgcctgttccatttcttgtataaattgctcataccagtcgtcagccacatactgtccataatacgttctaaatattgcgatatatcctctaacaaaatgctcccaattcactgctaaacttttaaattcctttcttgcgaataataagcgtattatattcctttctgccgggatgatttgttcaaaatccaaaaatacattagctgctgcttgattccatccaacaatctgacttcttctatctgatataatcgttgggcaataacgcagttcctgcaaaatttttactaaagccgggctgatttccttctcattctcatttctaaaaggttgtttcactccttcctctaatgctagagcatacaaatatctcctttcatcgttatttaattgtaatgctctagaaatagcatctaataccgaagtagatacttttatatctctaccttgttccaaccatgtataccatgtaagacttacaccagctaattgagccacttcttctcttcttaatcctggtgttcttctgcgggttcctacaggtaaaccaaccatttgaggagtaattttcgaacgttggttctttagaaattctgataaagcttgaagtcttgtttcaggtttcattaagatctccctttaaaatagtattaattatactaggataaacaacaacttgtaataggataacacaatagctaaagttaataaaaacaaggagggaattatcatgaaaagagttgtcattactggaatgggagttatttctccactaggaaatgatgtaaatagcttttggaatcaactagttaaaggacactcgggaatatctctaattgattcttttgatactgctttttataaaacaaagatagctggaatcgttcgtgatttcgatgcagatgaaatattggggagaaaagaagcaaaacgattagatcgttttagtcagtttgccttagcagcagccgaacaagcattagaacattcacaattacagttagataaggttgatcttgaacgtttaggggtatatgttggttcaggaatcggaggcatacaatcgcttgttgataatgtgaatgtattgaataaacgaggtcccgcgagagtaagccctagccttgtaccaatgatgatttcaaatgcagctgcggcccaaataagcataaaattaggagcacaaggaccatcattatcaccagtcacagcctgttcaatcgggaacacctctattggtgaagctttcaatgctatccgaaatgatgaagcagatattatatttgccggtggagcagaagctgcaatcacacagatttctttggctagttttggaaacgcccatgcactatctacaagaaaccaagatccaagtcgggccagccgtccgttcgatacagatagagatggctttgttatgagtgaaggcgcaggtatcttagtattagaatcattagaaaacgctattcttagagatgcgccgatattatgtgaagtagtggggtacggagctagttcagatgctcatcatatggtagcatcacacccagaaggtaagggtgcctacttggcaatgaaaaaggcattgagaagtgcaaatatatcaacaggtgaaattgatgttattagtgctcatgcaacaagtacacaggtaggtgatcgttcagaagttctagctattaagaaattgtttggtgaacattcccgcaaaattccaacaactgcaaacaaatccatgactggtcacatgcttggtgctgctggcggagtagaagcaattgctttagtggaaagtttgagacgaggaattattccgccaactattaatgtagagaagcaagatccagattgcaacttagatgttgtatcagaagcaagacaccttccattgaaatatgggctatcaaattcttttggttttggaggacataattcagcaatcttgttaaagcattacgattgaagacccatctttatagttcaaaggtgaaataatgaatctatcaagggtttatagcccttgattttcattatggaatacctcacagacaaatgatgacgggcctcagctatctggtatattaaatagaggaaagagaatacttaaaaaaacatttagaaagaaggtgatcccatgccaaataaaagtaaccccaatagattaatcaatgagaaatcaccatacttactccaacatgcccaaaaccccgtagactggtatccctggggaaaagaagccttcgaaaaagcaaaacgtgaaaacaagccggttcttgtcagcatcggctattcaacctgtcattggtgtcaagttcgtatagctacacattatttaaaaaaggacacatataaatatgcatccttacctttttattaacagcaagagttcgttgtactatcacttggtggtgttacacaacaagaggaggaatcttgtttttgattctcgctgttcgatttggtatagaaaaattcccattcattcctatttgggtcagtaatccaaaatttatcttggactgcataacaacaagttgtatccatttcttcacgtgcaaaaacccctctttttcaagcctttccttgtgtttcaaaacttcttccaaactatctacttggaatccaaaatgattcacttgatttcccgtcacctcgtctacgacatttaaagtgaagttcaatccaggagtctctaatagaaacttagcatagtctgtttttactttcacagcctttactccaaatactttttcataaaaatcgatcgatttctccaaactgacaacgttaacccctacatgaacatatttcattttaattccccctctaatatattaatcaaaaaaatttgatttaatgactaaaaattttttagcaacaatctccttcacctttttttctaaatacacaacaaagctcttctgataataaactatttacttcctcatcatttaaatcataatagctccatgttccctttgtctctttcgttattaagttggcatctaataaaattttaagatgataagaaagtttagattgtgttacctcaaaaatctcagtcagatcacaaacacaggtttttcccctttgacaaagttcatacatgatctctaatcgtttctgatcagcaagagccttaaatttttgttcatatttccgaagtagttctgatttcgtctcatccattcatatcgccttctttaatcaattttttttgattaattatgaaacccactaaaagctagtgtaaccagatagaggttttctatttttaatattttcctccatcgctactacaacaaggttacaacttgcttttggtggcaagtcatgaacacctaaaggagaggagatttaattaatctaaagcaaaaaatacaccaatatgatttggtatcttcatctaaatcgagtccctcaacatagtaaatcttcatctacaaaatactttcattacttaacatatatttaagttccttaatacgcaaaaaagttattgcggtctcaccgaaaatttaaattgcggtgccctattgcctttttctgcgaaagaaaacttgttaatatttacattactagtagagttaagggaagggtgaatatcttgatatcaatcacatcagctgaagtgggaatgaagattaatgaatggcataggcatattcaaaaattcaatgttacggatgctgaaatgttaaaggctgaaatagaacgtgatatagaggttatggaagaagatcaagacttgcttatttattatcaactaatggcctttcgacataaaatcatgctggagtatactctgccatctgatgaaaatcgaattgaactttcagaatatttaaagaaaatcgaagggcataagaagaagctagacaatatgcgagcgtattattataacttcttccgcgggatgtatgagtttagaaacggtgaatacacaaaggccattacatattacaaaaaagctgaacgcaaaattccaacgatctccgacaagattgaaaaagctgagttttattttaagttatccgaagtctattatcatatgaaaatgactcacatctcaatgcactacgctgaactttcatacaacatctataaaaaacatgaactttattctgttcggcgtattcagtgccattttgttattgctggcaactacgatgaccttgaaaatcatgaaaaagctctcccccaccttcaagaagctttaaaaggtgccgagctgcttaaaagtaaaaatactcacatctacgccacagcatttttcaatctcggtaactgctatcacaaaatggacaacttaaataaagctgcacgttatatcgagcaggccttggttcaatacagaaaaataaactctgacgtacttccgcaagcttatcacgacctagcgttgatttattttaaacaaggcaaaaaagaacaagcaatggattgcttccgcaaaggaatcagaagtgctgtagattttaaagacgaactttttatgaacttatttgaagcattagacgttctttatataagaaatggcgatacacctaaactcctcaacattttttctcgtttagagaacggcaaaggatacccttatctggaagagctggcattgttaggaggcaaccttttcgattataatggaaaaatagaggatagtatcatctgtttcaagaagatggtatatgctcaaaagcaaatatcgaaaggggaatgcatgtatgaaatctaaattgtttatcagtttatccgccgttttaattggacttgcctttttcggatctatgtctaatggcgaaatgaaggaagcatcccggaatgtaactctagcacctactcatgaattccttgtttgattcgataaacaacattagttctgattccctttagccgtttcataacggctttttcttattttagacatgaaaagcatttcacaaaagctggtcaaacccaaaaactagaactagatcaaaagacacagatcgaatgattcatttccaccctttgatccacataatacttagtttcatcattcttccatggtaatattttgttatataattaaatgagagggtatgaatatgaaagtctttgaagctaaaacacttatgtctgaagctacagaccgcgccaaagaatataaagaactaaggacgcaaatggtcaacttgagaaaagctttacaaagcgtcgctgaactggacgacagcgagttctcaggtaaaggcgctaataacattaaagcattctatcacgatcatgttggtgtcactgatcaatggatcgactacattgacatgaaaatcgcattctttaacagcattgccggagctgtcgaggacaagggcctctctgatgcttatattgaagagtcttttttagaacatgaactggctaacgcccataaaaaatcaaaatccatcatgtctgaacagaaaaaagccatgaaagatatcctaaacgatattgacgacatccttccgctcgacctattttcaacagaaaccttcaaggatgagcttgcagatgccaatgacaaacgcaaaaaaacaattgaaaaactaggtgatcttgacgaagatttactgacagaatatgctatgtcagaaccaaatgaacaattcatcaagtcagacttccaaaagctccaagaagcaacgggcaaaggcaaaaacgctactcccattcactacaacgccaaggcgtaccgtgagagtgatatacataagaaaaaaggcgatattgagaagcgaacggaagcttatttgacgattaagaaagaggaagcgaaggaacgcgagataaaagacttaaagaaaaagcttgcgaatggtgtctcagatccggatgagtatttagaaattgcgaagaagatcgggtatgagaaccttgaacctgcacagttacagtatgtggtgcagctagaacaagcaaaacagctgaagtccgtcggtgaaagtgtaatcaatgcgggtaaaacggcattggatatcatcgatggggttaatgatgggcttaacgatgcgattgatgatacgatatatggcatcaaggacttggttgtaggcgcatgggaattttcacagctccctatggaactaaaacttgcaaaaacaatcacaacagtcttaagtgtcccctcctaccctaaaataatttggacaaacatcgtcgattcatggaatgataaaatgataaatggcaatgcatatacaagagcacattatatcagttatgcggtcggtaatatcgttggtccaaaaggtgcaggtgctgcagtgcaaaccactactaagctctcaaaagtgggtaaagtggttgaaggtggaacagctactgctcatgtcaataaagggataaaccaaggcaaagcttacattaattctattgttagaaataagaatgatcttgcacttgtcgggattgcccaagacatcgataatacgtataatgcaaagaatacgcctttattaaaaaggattattgaagataaaaaagagagtgtacttagaaaatccgagacgtctaacaacatgggtataggtaatgtcaaacaaggtgatagtacccctctcgcacctggtggaggattagctgctcatgaggcaaaaggcgggcatcttatagaaagacatgttgggaagaccgacgaagaactaattcaaagacttgataagagcaaaatgagtaacaagaagatatccggttcatcatcatttaaagatagagcaactgcagaaagagttgctaatagtgctctcacaaataataaagcgaaaatagaaaaatggttaaatagtgatgtgaaaaagcctttagtactctcttataaagggaatgaagttttaggaagaggaataccaaagggagaagatacaattactgatttaactaatgctaaaattatattgaaaaagaacaaagatggtagctttatattaactggctacccaacgaggtgataccatgatagatacaaacatttccgaacctgtttttcaatttctaggaggtatttttcatcaagatatagaaactccagaatcagcactggacgaatacttagaagagattccaaaagaagagcaagaaactgatatagtagcattaaaagattttattaacagtgattatacggatgaagaaaagaatgattttatcgatgaagctgctgacggagtagacattcgtagttacggagtatctccattagtatggctcgaacaagttattcaaaaaatagaaaagaacattgaaactttataatccataaaaggtcccttgaaaattcaagggaccttttattacttcaaaagccctttaatttttgctttcgttttcggtccataaatgccatcaggatttagtccattcatcagctggaaccgtcttacggcatctgctgtttttgggccatacacaccgtcaattccattattcttagctcctttatccgggtagaagtatagtgcagccagtgctttttgaatttgccttacgtcgtctccttttctcatcgggcttgtcactttatagatgccggaaggcagcgcatatgacgttttcttgctgcttaattttgttgttttctttttagctgtacatgttttacttgtgcttgttttcccacctagcgcttttaattctttttcaatggcaaccttaacttgattccatcttccctctgacaaaatacggtgcgggcaatacttaccgttccagtcttggtgcttacggacacgatcaatgccccatccgcgttctttaagtagctgcgccacaaacttaatagcaagattttccgctgccttatatcgcgcccctcctgacttgctataacaaatttcgacaccaatcgacttacgattgcctgtaccgtttgttccatctcctgtgtgccaagcgttacgattcgttggaattccttgaatgacttgtttatcgtctactgcaaagtgaaaactcgttgagctagagttattcttcatgtaagaaatctcattggctgctgaagcatcattcgcagtgttatggatagtgatatactcagctttcattgggttaggacatttcaatccatattttgatttagaaactaaattctttacaactttgatggccatatatcctctctccttctgtctgtgtaataaaaaaagccactggcttagccagcagctctgtcagcgttattcttactctgttctttttcgttctccattgtttgtaatcgatctgttattgttgatgggattttaacaccgatctgtgctaagttttcagttattgacaatccttcattagcgacagcttcctgacgcacgtaggtaaaatatccctatgtgtgtcgtacacctctctgataacaagtgcagttcgtttttcttgaagcaatttcagtacaattttgagtgccacatgatagcttttggatgatccataaccacccacaagaaactgaaacttttgattccaatcaaagagaaattctttaaaatgtgggtttacttgtttaatcatttgtcatcactcttgtttacaatggtgatctcaaaaggtttatcttcttctgtaagttcttcagtctctaatttcttcttgtctatacttaaacgcatatgctctaatttaaggcgtcgttcgtcttccgagtgggctaattcatcaaactgtttaataaagttcctgagctctgccattgccctagattgagcgttcaagaacgttgcatgaggatcccaagaaaattggaattcatactcttcctcttcgccttcgttcacctcagataggatagtctttttctttttcagttccttaatcatttcctgcttatcagaaacgaacatgattttttgcgctcttataattgcggcatattgaatctgaatttggtcccatatcatatcaacaggggatcgctcctgtattccttccatgatcgatagcgtttcttctggcaggaacttagagaagaatccatgagtcacagcgttttgatttctcagtggagctgcaccacctttatttcctaatgcatttttatttccaagcggtgctcttcctcccttatttccttttgcatttttgttccctttaggtgcgcctcgacgcaaaagagcgctccctttcgatttaggagcgctcccttttattttttcttcccatttatcgtttgctttccattttcggacagtgctacttgttacgtttaattgctcagcaatgtcttttaacttcttactcccgccgctctcttcccacaaacgaaaagctttgtctctgcgtggatctcgtggtcttggcattacatcttacccacctccggatctcatgtttgagtttgtgtttgttttaatagtttttttctgatgtgtctactactgcacctttagacaaaatattcattttttcttatttagacttaaatctatgtcgaaaattattgtttgacatatcttatactaactccactaaaagaggtgataacatgtcaaatggttacaatagctccttcgtgttagttgtggtgttgttcatcctgttaatcattgtgggtgcttcattcctttattagtcttgaaatattttaatctactattaaaggaggtaactatatgggatactcgaatggttatggtagcactttcgcattaatcgtagtgctattcatcctgttaatcattgttggtgctacattcctttattagtctttaggcactttaatccaaagcggccttttggatttcacctccctgtacgaagacgccataagaagtttttatggcgttttgctatgttattaacaacacctttaaattgtcaaaataggatagacaataaaagagaggccactttaaaacctctctttttaattaattgttttcggaaatccttaacaacaaggttttccgcagtacttatgatgctcagtgacaggatcgtaacttgagtaactatgcggaaagtaatgaacatgctcataatgttgatgattcacgctagttgtatgctgcggatgaatgtgaggaacaattgtatttgagaacgtatgatgttcacaacacttagtcggatgcaaaattggaggtaaaattttgcaatgatgcatattttcttctcccttcattattttttatctgttataaactatgttcagaagcatctaatagtactattacaaccacctatttactgctccatgaggatttatcaaacaaaatcatgcacatcacaacaaaagctgtatagattacttattagagcaactctccactccacataaataccccatcgctctgccccacgtttctccaactctttatgatcaacgtggggttttattatgaaaagcgctcctcaatatgaatagaacccatttttcttggaaataatcctcctacgaacgaatgcacccgttattagtgaattcgctctaaaagcctcgtttgatagagcccattcaacccttatcatcatcaaacatgaggctttattttgtttttgtcgggaatattaatttttacgcaatactgctggtgttttatcacccgaattcactgtataaaacctcccagttgagttgatcctcgcttatcgctggggggttttctcattccatgaatgtagtggtgacgcaggaataattcgccgcgccgacctgcctcccattttacactacagattttttcggattcaacaagcgctcaaagtggcaatcttggcataattggctgatcaactcgtctttcattttgcgtacagtttcccttgaaatgccaagatgaagacctattgcacgataactcatcccctccatcatgcaatcataaataactttgtgctgctcccctttgatcttttctgcccccaactcaactgcatatactcgttcctcatagtacttaagacgtttgaaaagacgttcctctctcatatccatttgctgcaattctgcctgactcttcccgggacttccttttggcatagctgcttctaatccatattgtgcaacgccccaatttttcattgggattactgaaccatagagcactctctgcaatcgatgaacctcttttgccatccagtgatagctattgattagattttcaatatcttttcgattcatgattgtgttctccttttccaaataaaaaacggacaccaaacaaacagtgtaatactgtaagtttagtgtccgcaggctttccgtcttggacttaagtattgtttttttctattttaatctcgataggtttatcatataaatcttctttcttcttgatcatagttttactgcataaattgtggttactttcatttcctaataaaagatattctctatttatcgaatgtaatatataccatgtttcttttccatcttttatgtaaactttcgtagttttattaaaattaaatattggttttaaaagggctggaatatagcaagaaaaatatacagagataaaaaatgcaacaattttttgagtatttgtctcaaattgaaaagacaaaattaaaccattgagtccagtataaaaatacaaaaggattattaaatatattattgcaataaagatttttagaggtttacccttaatcttttctatgaagatgtaaagtaataaaaatatggacactaacattataccagctatacttatccaccttataatctcaagccaattaaagttgggattataacttgaaataagctgagctattgagacaaaaccgagcgtccagatcaaaacagaaatacaatatatccccaaccttataattaataattgttccttggagtaaaactttttttcaacaatacttgaagaaaacatagtgactggattccccgctcttataagttgtactattaaaaatccaactgcacttattgcaccaggaaaccctaaagaggctaataattgtttaaaagtatcttcgattttaatcaccactcttaaatttcatagttattccattttaccaatttacgctctccttctcaacgcctattattagacgtatcgggtagtaaaaagttgattaatcacctggttttaaattcaaggggataacaactgttggttaattttattatgctacacaaaaaaataattgatcaaatgctttttacctcaccttaaatcctatctcatgatcaactcttgcaaagctcccctttacagtttgaataacagtcttaccgtgctcaggagcatctaagacatgagcagttccctgattcccatctaaaacaatgatctgaacttttcctgggtcaattttctgctgaatagtgaagtcttttttgacgttaatttctcttggattgtacactcaaagcgccccctatgttatgatagaagtaccagttcatatcaagaacactgaggctaagcgcttcggtgttttttatttttaggcagaaacctcttttatcatgatttccaccctcggctcttcgctataaaacttactgactttcaaatccaccacctgattatcatctttgtatatcaactgattcaaagcactttcacaccctttacatagttatcaacatcaggctttgtagtaggccgcaaaagaccattttcagctttctctttctttttttttgagtttgaaactgacttaggcattggtctgtacactttgaaacaggaccagtaataattgtttctggtcgatgctgagacgcaaccaaagctacatactgcttaaaatactttgatttcgctggatttcgcatatgcaccttcccatttctcgtattgatccacgcggctgtccttgtgcgactggctcaccataaacagtgaacttaatgcaatacaactgttctttacctcccgtcaagctgttcccatagctcaatttctttttctattctcggtgcggagagtaaaattgccaacagagacacgactgctttaagcactcagcatccgctccatttgctttattttttcctcaagtaaacggattgttggtgtaagatctttaccttcagttggatttgaaggtccaaatatataaagtccaccaattactttcacattcgtttcctccttcattcccaatcaccttacctatgatttaattgcattcgatcgcctttaataatcactatgtaatcacgacacatctggtgaattcgtgaaccaagagcctcgtctatatccaaaatctcatcgactgttaactcagaagaaatcagcaaaggcttatgattcaaataacgataatttaagactgactggatttgttcaacctgccaatcggttgcccttggctgactgtttattggtttgaataagtcatcaatgaataggacttcgacctttctcatgacatcgagttttacaactaagttgtcaagttatgccagcaatacttatgataatcttctggaatcatggtacttgcaaggaaagaaaaaatgggctcttaaatccgtttaaatctaaacacaaaagaaccgcaactggcggttcttttagtatatattcctatttgacttcattattattggacagtaccataatcaaaatcaatatctttcttgtctaaatccccctcaaaatttttagcataagtcattgttaaatgtacgcttttatctatccaccaagttccatcatcagtattagtatcccaagtaacatctatatctcttcccaaattctcaaaaaacaccaaatttccaacagctactgtttttccgttgattttgtaatatattagaacaattttcttatcaaatatacctgtcccgtgctttacgattgttaaactataaggcttattaggacattgctcttcaagtataacttcaggatttaaaaataaaacataacaaatgaatagaattggtacaatcgttaacctttttaatacttttttattgatatttaacctcttcaacatagtcctccctttttaacaatccatttcatttgggatacaccctcatcattgaaggtatttcctatgaaaaatgattttgaagctcataggaacccttacatgacagggtttttgttgttttttcattgtctattaagatctaaatcaaaaaaagctataaaaaataaggaatgatacatattatacatgactaatatgtatcactcctttagtttttgttcaataatcgcccccgatagtgggataagaaatagcaaaagaacttgctatttctcaaatacatccaccaaatgttcaatgttagtttgtttttcatacatactaataataaaagtaaaaccttattaaaactttacaacacaaactgaatcgactatagtctaattagactaaaatattgatgtaaagaagggaaaaattagatgataaagtcttttttaatgttggggcagtcgaatatggccggccgtggatttttgaatgaagtagacccgatctataatgaaaaaataaaaatgttgcgcaatggacagtggcagatgatgacagagccgattaattacgaccgtccggtctccggcgttggcctggcggcatcttttgcagatgcttggtcgaaagctcatcctgatgaagaaattggcttgatcccttgtgccgaaggtggcagttcattgaatgactggcatccggaaggcatcctttttcagcatgctttgtccgaagcccgcttcgccctccggtccagtcaaatttgtggaatcctttggcaccaaggtgagagtgacagttatcgttcgctacatgaaacttattacgagaaattaactcttatcatcgagacactaagaaacgagttggaacttgatgaggtaccgttgattattggagggcttggtgactttcttggaaagaccggttttggacagcacgcgactgaatttcgacaggttaatgaacaattgctgcgttttgctaatgaacaacagaattgttattttgttactgcagcaggtttgactgcgaatcctgatggcattcatttagacgcagcttcacaacgcaaattcggttaccgctatttcgaggctttttcgaaaaagtaccatatcctgaaacccatttcgggagaggagcaatcgctgaaagtgaatggtgactattctaaaacagaacagatttaccttcatagtatggatttggcttcgggtaaaatcacgtacgcggaatttgaggcgcggatggcgaaggtgatgaaaccatgattcccttacttatccttggcttgctaatccaaaaccccggagctcacggctatgaacttttggccttaatggaaaaacgtcattacaaatacattgttaacttcacgaaaggttcattttattacaatctgcagcagcttgaagaaaagtgttttattgaacagattgagcagaaaccctcaaccagcgggcgtgaaatccgtaactacaaagtcacagattcgggaagggcagaattcgaaaaattaatgatcaaatacggcgccaaatcggaatatgtgaacctgcaattttatggggcgttactctttgcagatgaattcgacaaaaataaattactggatctgatccaatcacaaatcgatcagactaaaactcgaatcgagctccttgatgaatacctgtccatcactcaagaaattcccggcacaatcgattactttcgccgtatgaacgaaaattcccgttcacatcacttggttaatttagagtggtttgaaaaattgaaagcagaaatagaatcaactattgcagaataaaaaaatgcaaagttaaaaataagaatattagttacctacatataaaacctgtgtcgtagatatttagtaacatcttttatacaggttttatactccttctttaattaaacaagtaatagggttgtcagcacttgcccccaacaagagcaagtgaatcagctccgtgttcttcttttcaatcgctagccgttagtttaattagaattcaaataatccaagacgcggtgaactctttcgctgactgagcaatcgccttcaatttttaacactggacaagataaatctgccatccaatgatcatgcaaagctctacttctgacttccattccagcagtatcatataaagaagcccactctaaaaatgcttttgattgttcatatttactgccaccggctaacacttcatttccataacgctgaaattccctatgccttaatctctcaagccgtatatcttgtggaatccataagaagacgacaaggtcaaaataactttttagattatcgccccagccacacactgcaccagaaagaatccatttctcatttattgttaagtctttttcaagcaactttcgtctttcaggaatttctctttttttagtgaatttatctaaccaatagtaatcatcggtatcaagatgcgtatgaggcaaatgctttgataatgcagcacccaatgttgacgttccgaccccagaggctcccaatatgtgaatattttttttcatacttccccctccttattaagcaaccaaactccctgttgcataaggtacttactattattttgacataaatccctaaagacctttacttttctagagaaatccagatgcgtgttaaaatcatcatacttacgaaaacagtcattattaaacggattcatattccatctcctcagatgcattttcctatgaaaaaagtcttgatttccctataatatttaaacgaatccaatttttagattgtcgtctttaaggaggtttttcatcttgaggtatacaaacagtcatttagaggattggattgaaaacttatacagaaagattgatattacagagcctgaacaaattaattttgaacggattgccgaggctttagatattaggctgtcgtttaaacctgttacaagcttcgcacttaaacacagcggaatttataatatatgcttggacagccgtaaaagccgaactgaacaatggtatgattttgctcatgaattttgccatatatatagacatgaaggcgataaaaaaacaatgcctgcaacctggactgattatttagagtggcagtccaattattttacatatcacttttgcattccaactttcatgttgcgtaatattaatctttcgtacatacaatcccatgcaattgaaaatgtagcttggttatttaaggtgtccccttcattcgctaagaaacgtttaagcatttattacaggaagctgactcaacatttatttaatcaaacagttacgggaaatctgtgcaccccccttttgtaattaataatgaaatcctcatgcatttgcgcgcattgaaaaaaacaaaaaaagacgtctcccttcacgatccgatcgggcaggataaggaagggaatgaaataagcctgattgacgttttgaaatcagaaaacgaagacgtgatagatacgatccagctcaatatggagcttgaaaaagtgaaacaatacattgacattttagatgaccgtgagaaagaagtgattgtcgggcggtttggacttgatttgaagaaggaaaaaacgcagcgagagattgccaaagaactcggtatctcacgcagctatgtatcgcggattgaaaaacgggcgctgatgaagatgtttcatgagttttatcgggcagagaaggaaaagcggaagaaggcgaaggggaaataatgcagaagaagccggatctcatactccggctttctctatttcattaaagtttttttaaaaagaaaatagagaaaaaatatataaaagagtgatgaaaatcagttttgtcatcactgataaactcttcgagaaaagcgtctggatcatagcagatggcttctctcttatggggcgttacttccctccatcaagcgattctaagccggacgttctaaaagctctcctgagaaaatccttagatcggtatacttcagtacattcctagtcactgctttctttatagaggcctcatctatgctgtcgatacccttacatatatgactatcacaatgagaggacttttaatgaatatgaagaatcagttaaaaaacattggttagaagcagttcattttaaagaactactcattttatttcttcttcaattaaatcactggcgtttaagtacaattcttcacaatctcttctgttgactccaatccctaagtagtgctcctccagtacggtgacacatatagagggacgagaaaatctcatttaaactgcccatccgatggcgggcagtttaattattacctctcctgttcctttatcaccctctcaatcccatataaaatcagtttcaagccaaactcaaatgctctgtcagtccccatcaactcaaacagcccgttcgtaaacatcctccggaataatcccgcatctgtctcgctcatggaatcaagaaggcgtatcatctcctcccccggatgctcttcttggtccttcaggatagcagtgacattgcgctcatgctgataatcgtctaaaacgaagtagaagacatagtttacaagcgtagtaaccacttgcattttctgctcttgcttaagtggtgttgattccacgcagagtaacattcggttcgtgaatcggatgatgtccggttcatggggcagcgtcatcatcatgagctgcgtagagcaaggatatcggctgagcacgttccgtaccgttatcgcaagccccatcagctgctccttccagtctccctcggagtggaactcctccagaatcattttcgatacttggttagccagacgctggtaaagcttctgtttgctcttgaaataccagtacagagagggagcctgaatccctagcctgttggccaatcgtctcatgctgaatgtttcgatgcctccctccccaagaagttcccacgaggtttctaaaatcttttcctctgaaatctgaggctgctgctttttcatattatccgtccttttatctaacagtgtaagtttctctttacaggtttataaaatgatgataccatctaacactgtaagactcaaactaacagtgttagattaaatataaacaagaaagaagtgaaatataatggatacagaaaacctctattattttgaaaaagcaccgatcgcaaaagctgttgctcacttcgctataccgatgatgctaggtacatcaatgagtgtcatatattccattctaaatgcctttttccttggtacactccacaataccgccatattaaccgcactcgcattaaccttgccgttatttgcaatcattatggcgctaggcaacttgattggcatgggcagcggtacattcatctcccgtttgctcggggagaaaaaatatgatgatgtaaagcatgtatcctcatttgccttttacagcagtttagttcttggtcttattgtgatggcagtgggtctccctttaatcgatccaattgttcatggcctgggggcaacatctgactccttcggcttcacgaaggactatgtcatggttatgcttattggttcacctttcgtcgtattatttttcacgctggagaatatcgtgcgctcagagggttcagcaatcacgtcgatgaccggtatgattctcagtgttgttgtaaatattatgcttgatgcgttagtcatcttcgtatgccattggggtgtaatcggagttgcgtctgctaccgtcatttccaacttggctgcgagttcattctatgccttccacatgggatataagagccagttcttaactgtctccgtaaagtggttcaaggttggcctggatattctgagcaatgtattaaaaatcggcattccggtctttattatgagtatttttttgggggcaatgtctcttatctttaatcattttcttgtcgaatatggggacaaagccgttgctgcatacggaatttcatcccgcttatttcaatttcctgaatttattttgatgggactatgtgaaggggtcgtaccgttaattgcattctcttttacagcggataaattacgcatgaaaaataccattggatttacattaaaagcgattgtgacgctagcagtaatgtttggcgttatcgtctatttaatttccgaccatctaataggtttatttacaaatgacccgcaattaattaaaataggcagctacattctacatgttacgtttttatccatatttattacagggatgtcctcattatttactggtatcttccaagctaccgcgcaaggaacggccgcttttgttatgtcatttatacaaggaattactctgattcctgtattgttcatcgccaatcaggtgaacggctttcatggggtggtttggtcacttgtcattgcagatacagtcgcattccttgtaggtgccatcatgctttatgctttgaggaacaaattgcagcctgaattgaatagttaagtgctagtaaacatatgacatttaaatccgtattgtaaactaatcaaatatgtaaaaaaagatagtttagccctcataatcggctaaactatccccttctcaaatcctcccactttattattaatgtggtttagaagaattgaacctgcacgagttattccgctcactatcattgattatgaagcttatatattaaaaaatggtgagctcaaaacagtaaacgtcgggcttttttactctcttccttttaaatacacgattagaatcatcaaaaacaataatgatatttacacaaattgcgatttacgcaaaagtcaccactcctcttttcatggacagaaaaagaggagcaaacctatgtctgcgtcttaacgtttttctttgcacaacgtctagtatcttctttggatcaatttttctgtaagaaattcaacaagtgttactcaacgacatgaagaaattgtttatgtccttgtcatttcagttattcaactattggtgtaagtgaactaccagcccatacctctcccttattaagggtccagctgtcattataaaaattagacccacctttattaaccgaagggctgtgaacctcatcccaagttagaaagtacacggttttcggatatttttgtttgactgtattaagaaacacagcataatccaaattaccatcttgtttttgtgtgccgatttctgtgaacgcaaatggcttattaagagctgttaactcatcatatccttgaattgtaaaatcatctgagaaatacgcatctaatccaacaatatcaacatatgaagatccaggataaaagtcagtcttaaagtctcgattggcgtccggtgagtaaacccatatcaggttgtccaaacctcttgtatcagtcatataatgatagattttttgataaagttgtttataaagtgagaagcgctggctgtcttttttgttatattcggttagtccccaccaaaaccattctccattcatttcatgaagaggtctgaatagaacaggtacaccttcattttttaactgatcaaggccatctgcaactttgctcagaacagcctctaatcgcttaccctctgtagttgatgagtctaagattttttcatactcactgtttgaaatatgggaagcatttttcccaaaagtactggatgcaggattagctagatgtaagctaatctgtggtattccaccacttttccaatatgagattaagtcactgttgcaactatagtcgatcgtctcagtaatatcagaaatatagggcttctccaaccatccactggaatagtcacaaccataaattgcgggtaactggcctgtagcattcttaattcggttggcttctttcatggaaaacgaagcatttgtgaatccgccgaatgtacctgacagtatgcgattttcagatcggtttggcagatgagccagccaattcatcaactctttcgttgttgcctgtgcattaggattcacagggtaaactgtatgagcaagagccgactgtgaaaaagatgaaaggattatgaaagatagtaatataaaaacagcaatttttttatacataatattctccgtcttctactttttattattttaatcatttattctgttaaagatttataaagcacagaatctattaagtcatttacgctttttcatcccctttcatatttaaaataagagagaccttccttagagatatttgcatttacccattgtaaatctccattttttgggcattaattatattaaaccgaaaaatatcttctttcatcagacgtttcacctattttttactgtatgcctcacagactataaagcaaactttcccttttgcatttaaaccttattacctatttcattaagtcgaattattttcgatattaagtggtgaatgattttcactctcttttttatcctattaaattattttaaaaaataatcaaaaaacaaatcattttgatccctattcatagcagcaaacgttacttttggtacaaagtcctttataaacagaaagaggagcaaacgtatggtttactcctctaacttagtttctttcttcttggtttttcataatctgatgttttccttaacagcagttccaacccgtcactttctccgcagcatataatcaagattctaataccaatccaaaagttattttgatctactgagaattttaatttgcggtgccctattgcctttttctctctctgactcatagttttaaaccattcaataaaaaaccctcaattgatgtttcatattcatttgattttcaaaaacttcagccgtatcaacctgttaatcttacccgctgacttatatcaaaggagctctaaccaaattttaatggctgtcgaacttattaatagcgctaaaatccattgcaggaattttgtatttactttttgcccaactgatgcgccaataggagaagcaattaaactagcaatcataagaaccagggctggtacaaaaagaacctggcccgtaattacttttccaactgttgcgccaatagatgaaagaaatgtaatcgcaagagatgaagcgactgtgattctaacaggaatatttaaaatcgataacataatggggactaggataaaggcgccgccagctcctaaaatacctgatacgccaccaatgataaacgctagggacgaagccaaccatttattaaatatcacttcttcgccttctctatgggcttgtcctcttttaggtataaacattaaaataactgctataatagccagaattccgtatataaagttaattcctttttcagatatataatgagaaaagtaactccccaatacactccctaaaaggatgctgcttcccatgtaaattattaatgctttatttagaagaccactcttacgataagcccaaacaccgccaagtgtcgcaaagaaaacttgaatagcccctatccctgaaacttcatgggcagttaatgacatcactctcactaaagagggaatatacaacagcattggataattaataactgctccgccaataccaatcattccggaaataaaggcaccaataaaccctataatgaaaagagttgtgataaaggcaatatccactttggtttcctcctatcaaaggaaaagggtatctttctattcgataccctttcacattcattagcctttttgaatccaaaatttcaatacatcgccctcgtccgtttgctctaaaaggtcatgtccgcctgatttagaccaggctgcaagatcatttttagctcccttatctgttgcatgcacttctaatatttgacctgattccagttcattcatcgctttttttgtcctgacgattggcattgggcatgccaggccttttgcgtctaatactttatctgatttcatgttcatctctcctcttattaatagaaacttgtgttaccgtattgcacagcggtttgggccaatctccatttcacgctgtttttcttcatctgggctgattttccccatgtttgtttctcgaatctcttggtatgcatttggttgcggaggcaaatgatctgttactaggtgtctaaattctgtttcatccgcaatgttcaaaccatggttctcgctaaataatgtacttagttttttaccaacacttccatcctcatttagctcgtcaatgatcataaagtgtgccggtaatacaattaaatcctttgataacgctttgtaacggctataaagcgtttttcttaaatctcctacccaatcttctgccataccggctaagtctggtctgccgattgaatcaataaacaaaatatcacctgaaagaagatacagatcatcgacaatgaaagaagtggacccaatcgtgtgtcccggagaataaatcggttgaattttaatcgttgtatttccaatgatcatgtcgtttccttcttccaacggctgataatcgaataccacttcttcagcatctttaggcggtaaccagtaggttgcttttgttttttcagcaatgactctgccgcctgaaatatggtccgcgtgaagatgtgtatcaaatacgtgagtaatcgttgcacccttctccttcgcaaaatccataaagaaatctaccatacgtgtcgcatcaataattgctgcttcaccattggaaatgaccatgtatgacaggcagcctttaccgattcgaacaaactgatacatctcaccgccatcttttaaatccccgacttttaccggctctaaatgttcgctccatgctttcattccacccttaagataggatacagaatgacctgcttcagatagcatttcggataccatgacggatgaaccttcttttgcacaaacgaccagcacttctttatcagaaggaattttctccaatatatcttctacgccatctaaaagatcaaaataaggaacattcaaatggtcaaagtcatgcccttctatcttccaatcattaaaatcattttcattacgcacatccaaaataaataaaggttctttgttatagattttttttgtcacttcttttggggtcattgcctttacggtcatgtttcaatacctcctatatcaaatcttttagcggaactaaaacgttaaggatacatcagcatctttaacaaaattctaaaaaggtaacagccccgcctacttcgattccttgtataaattcatcttttgttaaacccataacgtccatcgttatttgacaaccaattcatgcaactcccatttcaatcagttaagaatagaaggcacatttgcgttcctacaaccttctgcgacatgctcttttccttgtcgcaatattacagactttataagcatcaaacagaccgccatttgccgcaataatcgctactcttgtactcatctgttcatcatgctttttatttattcggttttacctgtccactcccgcataccggggacaacattaataacttttttaaaaccttgttttttcatggtgtgggccgccatttcacttcttcttcccgaatggcagataatataaatttcatcatttttgtttaattcattagagcgcttttccacttcaccaagagggatatgcacaactccaggaatatgagctttttcatactcctctatctctcgtacatctaaaatgttaagagactcgtcactatccactttctgtttgaaagcttctaatgaaatatcaggaattgaagatgcattttctgatgaatgctctcctccttttcgaagaaaatgacgaagtatttctccctctgcttcagtacctagatattcatggcctgtactttttgcccatgcttccagatctgctgtggaacctttatctgttgcttgaatttccaatacttcaccagcttttaaatccttcattctcttcttcgtttttacgataggcattggacacgccaaacctttagcgtctagtacaatagttgctttcatcattttttcctccttttttcatataggggtgggggtatataaatatacaaaaagtttctcactagaagttaataccatgtattcatgcccccttttatatttgtgatgtttttaaatccttgtttcttcaatatttttacttgcctttaaacttctcattccgcttagcaatgagtaaatgagtagcattagataaataagttgacactgccttcctcagcatctgccaaataagctgctacaccagcatagtcgatatcatctaatagttctttttcctgtaaaccaagaagatccattgtcatcgtacaagctacgagctttaccccctgttcttgagccatctcaatcaactgaggtaatgtaagtgcattatgctttttcatcacatttttaatcattttagggcccatacctgcaaagttcattttagataaacccatcttatcagcaccacgaggcatcatctttccaaacattttttcaagaaatccttttttcactggaatcagctcttctttacgtaaagcgtttaatccccaaaaagtatggaagatcgtcacttcatgatcgtaggcagctgcaccatttgcaataatataggctgccattgccttatcataatccccgctaaataaaacaattgttgtgcgttttgtttgttctgtcatgtttattcccccaactaattacccctgtgggtatattaaagtcaaaaaaattttttcgaaagatctgcttttattcaactctttaaataccatagggggtataatataacgcatataaaaattcgtcaaccttaggttgatgaatttttatcggctctttaccaataagtcaactgcttcttttactaaattttgtgtgtcttcgcctttttctaaactttcacgaacacaatgttcaaggtttgtgctcacaattaaacccatcgctcgatcgatcgcattacgggaagctgctaattgggtcacaacctctctacaatcttttccttgttccatcatagtcaatacacctttaatttgtccttcaatccgtcgtaagcggtttttaatcttttgatcatactccatatatcaatgaaatcctttctttcatttatttttacatttacatgctgccagttcataactgtttacatggatacctttgcgctttagaaaacgcactcctaaatttaattccacccgatcacgagctattatgtgtattttatcacgtggaatctctaaataaaaacgttttagatacgcatatgggatgtttaaaataatattatccgaaaaattggctacatcgttataatgacgaatatctaatattgtgatgtccatagcctctaatttatctttatggatacaagagattccggttataggataataccgtctatacgatgcaatgataatcacaaaaataagcaggaatgcaataactaaataattgatactacttacaccaccttattaactctttgttattcacaaaactataatatacccccataggtatatagtcaagtgtgaaagttactttctttgagctgatagattcatttcaatatccgcggattgaaaaaatacttacatttcgataatgccaattctgctaaaagtaactcgaataaagaaataagccgattttattttaaatcgactttattttatcaattacttttaaaattagcacaagactgcttggatattacattgggtttcatttgcataaaaacaattcttaggtactggttccccatgtttcatgctggatgtgactccaattactcagaaatctgcgaataactatgctaatcttccgcagccactgcatctgctttggttttatgaactgtaccaaatggatggttaggaggagcataaatggagtaaagttttaatggcgtattacctgtattaatcacgttatgccaagtgccggcaggtacaacaatggcagaatcatcataaacatttctttgaaagttcaaatgatctttgctctttcccattttgacaaccccacgcccctgctcaatccgtaagaactggtcaacgttaggatggatttccaacccaatgtcttctccaataccaagactcatcaaagtaacttgaaaatgctttcctgtccataaagcagtacggaacgtattgttttgttttgtggctctattgatatttacaacaaatggttttggtccataatcctttaaaagaagatttctatcttcatatgaagagcgcaaatcggcacctctgtgtacgttctccatctcatttggaatagtccaataaacagatcttccatcattatacatcggtacagtcacataataataacattgaggcgaaaaagggttatagtacattttttgatccccacaattataaatttttgtgatagtatcctatgcatttattaagggagtgtgctaaatcaagaaaaatcatattaaacacaaaaatgaatgttcgatcaccgtttgattcacggatgaataatttatcaccgaccttgtaatcgttttctggatgttgaatttcactagcctttgttaacaagacatcgaatgacacttttatatcatggattatcaaaggtcgacgatcctaaatggcttttgaacatttacatagcacaacaacagagtatacggaattctgttgtttgtcccccctatcccagctcttttagatttatccctttggatgcgccttgatggccagcttttcagcagcgtagtatttagcgcctcctgaatcgttatagcatatttcaacgccgataaacttgcggttcccagtgccgtttgtaccgtcacctgtatgtgggctcgtttttagtaaaccagtttatattctttttgggcacacaatagaagcaatttttcatatgaaaatttcgtaatcttacacctctttaacttgaaggaggatttttgcatatgtattttcatacccgtcaactaccatctcatccagcatatattcctcatatgcattttcccctatttgcattccattcttttcaatgaactcaatgattctccggtacgcctcttcagtatttccgcctatttcatatccaactgcatacaggccttttggccgtacatgataatttatgttctctcccccattttttacttttatataaaagtaactgtaattgtagaagtctttttctaagatttgttcccgtgcaaagattccgcctatcggatatccttcatctaattcatattgctgaacttcatgaatgagttctgaaatggctgccacatattttcgttccggtaagtttaatgtttttcggcttaacatgaatgtttcttcatttaaatattcaaaagaaattgaggaaaaatcagtctcaagtgcttgttctgtaagcgtcacttttgtttgtaagatcgtttgcaactgcttaagctcatttatttttttatcaatctcaatagacttttcttttagaacatgcaggatcttgtctggtgtttttccttttattagacactttatttcttttaatggaaccccaagctctttaaatagactgatgacttgaaaaatctcaaattgatgataggaataatatctatacccattttctttttttatttccggcgagaaaagaccaatctcatcataatgaaataaggtttgtttttttacacggcagagcttcgaaaactcccctgttgtgaaatacttcttaacatcttcgctcataaaaacctccttgactatacggtaaccatataccttatgatttgattgtacttgaaaaaagcttcaagcgaaaaggataggtaaaaagggttcaattgagtaaaaggggaattcagatgaaaaaatcaataaatgagcaaaaaacgatattcattatactattaagcaacatcttcgtagcatttcttggtatcggtttaatcattccagtaatgccttcttttatgaaaatcatgcatttatccggcagcacaatgggttatcttgttgcggcttttgccatttctcagttaattacttcaccttttgcaggtaggtgggttgaccgtttcgggagaaaaaaaatgattattctcgggttgcttatattcagtttatctgagttgattttcggattagggacccatgtttcaatattttatttctcgaggatattgggtggtgtaagtgcggcttttatcatgcccgcggtaacagcatatgtagctgatattacaaccctaaaggaaaggtcaaaggctatggggtatgtttctgctgcaattagcacaggctttattattgggcctggtgcgggaggatttattgccggctttggcatccgcatgccgtttttcttcgcctccgccatcgcgttaatagcagctgtcacttctgtttttatactaaaagagtcattgtcgatagaagaacgccatcaactctcatctcatacaaaggaatcaaatttcattaaagacttgaagagatccattcatcctgtctatttcattgcatttattatcgtctttgtaatggcttttggtttatcagcttatgaaacggtattcagcttgttttctgatcataaatttggcttcacaccaaaagatattgcagccattattacgattagctccattgttgcggtagttattcaagttttacttttcgggaaattggtcaacaaacttggagagaaaagaatgattcagctgtgcttaataaccggtgcgatcttggctttcgtgtctactgttatgtcaggatttttaactgttttgcttgtaacttgttttatttttctggcgttcgatttgctacgtccggccttaaccgctcatttatccaatatggccggtaaccagcagggtttcgtagcaggcatgaactccacatacaccagcctgggaaatatatttggacctgctctaggcggtatactatttgatcttaacattcattatcctttcctttttgcaggtttcgttatgattgtcggccttggtcttacaatggtttggaaagaaaaaaagaatgatgctgcagctttgaattaattcattttctataaagtcaagtcatttggatgcagggaatgcccctggttaggcacaataagaaaaggtacttaatttgataggctacatgttgcttgacgtgaatatagtttaagctgagttttagcaatatcaggataccgggataagaaaaaaggagaatgtagtatgagtataaaaataaaaggagtaactgatgataatcgtgctgcaattcttgatctacatgtcagccagaatcaattatcatatattgaatctacaaaaatatgtttagaggatgcaaacgaatgtcactattataaacctgtcgggctttactatgaaggagatctagtcggttttgcaatgtatggattgtttcccgagtatgatgaagataataaaaacggacgagtctggcttgaccgattttttattgacgaacgctatcagggaaaaggattagggaagaaaatgcttaaagccctcattcagcaccttgctgagctatataaatgcaaaagaatttatttaagtatatttgaaaataatattcatgctatacgcctttatcaaaggtttggttttcaatttaatggtgaactcgactttaatggtgagaaggtaatggtaaaagagctatagatatccaggcctccttttttgctgagaaacgtttgaacttcgataatgattacctacttaaactgcaagatcattgtttaaaaaagcctggatgaaaatttcatctcaggctttaagcatcttattagtcaaaatctcatgtgttttatccagatgttattcttttttccggacaatttctaaataattaatatgccggccaactgttttgtgcactttaaaaatatacccatcggcttctataacggacccaactgcagcgtctatttgttgagtcataaaccagccgcctattgtatccacttcgtcacttgctaacgtcgttcccaataaatcatttacatcttcaatgagcactttcgaatctaagatatagtgattatcatttacttttctaatattaggcacttcatctttatcaaattcatctctgatttccccgacaatttcttcaagaatatcttcagcagtgactaaacctgaagtgccgccatattcatccacaagaatagcgatatgtgttcgctctttttgcatttttaccaataaatcatgaattggaacggattcaataacatggataacagggttgatatgattttctaacttgaaatcctcttttatcttctggtctgtgtcaatataagctgacaaaaattctttagcattgataaaaccaatgattgaatctttatctccatttaggactgggtaccttgtatagctctctgtcttaatggtcttaacaatagtttcataagaatcctcactagaaatcgctacgatctctcttctcggaatcataatttctttggcgattctttcatcaaattcaaaaatattatttacatatttcaactcattttgattgatttcaccgctcttatagctttcagacagtaagatgcgcagttcttcttcagaatgagcaagttcatgttctgatgcaggtttcaaaccgaagagtcctactataaaccgggctgaaccatttaaaaaccatataaaagggaacaggatgcggtaaaaccaaataattggctttgcagtcaaaagagtgatggtttccgctttttggatagcgagtgttttaggagcaagttctccaactacaacgtgcaaaaaagtcgccatcacaaaagcaatcactaagatcaatacatgtgagactgtttcacttacatgaaaatgagcaaataaggggtgcaaaatcacttcaaaagtcgattctccaacccagccaattcccaacgctgtaaccgtgatccctaattgacaagctgacaaatattcgtccaaatgagtaatgacctttttggctgatacggcacctttttttccctctaatatgagttggtcaatttttgatgacctgatctttactatcgcaaattcagtcgcaacaaaaaatgctgttaagacaattaaaatagtaaagattataaggttaatggttgtcaatgatttgccttacctagtaaggcgtacacctccgatataaatatttatttttataacccgttttttctgaataaacaaaaaacagtatatataacattataagttcaaaagaacctaaaatcaactctgaatgatgtaaataatcatctttttccgtatggagagtggttcccgtagtattcaactagcgattggtgacgttttaaggcttaaaatagaaagcaaaataaaaacacacctgaattttctggtgtgttttaataatatccaaccgtcttgatttatttaatgtctttattaaggttttcttttaaaatttgaatcaattccgcctgttgctttatatttttgcggccatttctattaattgcagcaagttcacagacaattccagctgaaatgaaaaacaataaaccttcaaacattttaaatcccccaccatctaagtgatagtcaaatttgttttttctttttgtaatacctgcttataatcttccttacgctgatatatgttatttaaaatgagtccaataatgacaaacagtgttcctactatatcaaatgcagttatgttatatcctttgatcaccatgattaacaatgtagtaatggggacaaagttaataaataaaatcccattaatggatgataggattttaatgccatagttccaactaaggagggctatgatacctggtaaagtaatcataaataaaaaatcatacttaattgctgcaatcactttaatactcggtaccgacacgtaaccttgcgcggtaagtatagctgtcatgattcctgttatagctgtgccgaataaacatgtcaatgttgaataacgaagtgtggaccactctcggaatatctgtccccccattgtgtagacaacccaccctaaaacaccaatgaatataaagagtagcgagaatagatgatcccccaataaaaaaaagaaacttatattacctttggttatgaccatcgaagcccccaaaaaggcaatcaatatactgatcattgtgtattttttaggtttcacatgtttatatccccatagaataacaattgaaagcattggcatgagtgcctcggcaatggatgctgtcataattccagacttccccatcaacctttgacctaaaaaaataagaacattgtatacagtaaacgccataaccccaaataaaatgatccattttgctttaccctctaaatgaaatgatttttttccttctcttaccaataataaaatcactaacataatcgttaccacaccgtagcgaataaatgaaaaataaaacggatcaataacttctaatgcatgatctgcaactggaaacatcgcgccccaagacatacttgctactaaacatgtaagggcaccaatgaataattgactttttttcattgaattcccctccttttctttaaaattacaatgagaattataaaaagaagtaagcatcaagtaaaatgaacaaaagtgatgaaaaacatcattgataatgatactttaatgaagggggatcttcatggaactgcgagacttacaaattttcaaatgcgtagcccatcacaagagtattaccggtgctgcaaaagagttaaattatgtacaatctaatgtaactgcgcggattaagcaattagagaatgaactcaaaacacctcttttcaatcgtcataaaaaaggggtttcactaagcccagagggccgaaaaatgattgaatacgttaacaaaattttgaaagatgttgaagaactggagcaagtctttctagatactgatataccttctggaatattaaaaatcggtacagtggaaacagtgaggatactgccgaccattatagcttcctattataaaaagtatcctaatgtggatttatcattgcaggctggtctaacagaggaacttattaaaaaggtcatgaatcacgaattagacggagcttttatttcaggccctttgaaacattctatcctggaacagtatgatgtttatactgaaaaacttactcttgtaaccagtaacaaaacgtttaatatagaggatttttcaacgactccgattcttgtttttaatcaggggtgcgggtatcggtctaggcttgaacagtggctcaaagatgaaggtgtgctcccaaacagaatgatggaatttaacatcctggagacaatcttaaatagtgttgcacttggactcggtataacagtggtaccggaatctgctattatgcatcttgctgcacaaggtaaggtttattgtcacccattacctgagaaagacagctgtatctcaacaatctttatacgccataaagatgcgtacctgacaaattcaatgcgcagcctccttaagaccattgttgaacataaaaatatgagtatgtcttaaagtgctttttctctttctatgttaacttcttaaataaaagagaaagcgcatctccacttcgctacccttattcacgcaaaaaatagagcagtaaacatgtgagttactgctctgcttcgtttatccaccgttcatttgttttacaatgtattcagcatcatttcctacaccttgaagcaacgctgaacctcgcttatgctgccaaggcaaccctataaagtacaatccttctacaggtgaaacacctctatgatgtatgattcgaccttctttatccaaaacaccttttatatttatccaacataagggattcctgaaaccagtagcccaaataatattgtttacttctaatgtagatgaatctttaaaaatgatttcattttgctttgcggcaatgactcttttttttaagatgatctccttctgttttattgcatgttttaattcatgcccaaatactggatcacctttcttttgaatgaatttgcctactattgatgtatgacttgcatgtaaaactcctagtttatcaaaccaccaaaagatgcttctttttcctatcattaaagggaaataaacaagtttattactacaagctaaatatgtaactctttctttggataattcaacagctatttgagcaccactattcccaccaccaactactagtacatttccatatgccaattgttttgaattcttatattgtgatgagtgtagttgattaatattatcggataaatcctttgatattgatggaatattaggggtatgaaaaggccctgtagcaatgacaagattcttcgtttgatattcttcccgatttgtttttattaagaaataattctttatttttaggacacttattacttctgtccgtaattggattggaatttcaaattttttaacatacttctttagataagcaacaatttcattttttgaaggaaatccatgtttttctccttcaagatgcattccaggcaaagagctatacattcgagaagtaaataaaactaatgagtcataccgatctttccagctctcccccaccccatgacttttatccaaaataataaacttttgatcggactgctttagataataccctatcgagatccctgcttgaccagccccgattactatagtgtcgtacacattatcaccccgccaatttcaaattgtcagtagacagaatttgcaaaatgctagttgatctcctcactataaagttagataaaaaatttaatggtgatggtggttacgcggcttctccattttaggctgacaaaggatcgcattgtcgtgattatgcgcttcggtttccatttgaatggttacgtgcgtaatgcctttatgctcaagttcatgttcaattttgcgtaaaatattttcactttctgaaatggtcagttgatcgtccacaactgcatggcaagaaagagcattcaatccgcttgtgatagaccatatgtgtaaatcatgaatgttttgaattccctctgtcccttcaattgtacgaatgatatcagagacatcgatattttctggagttccttccattaagatgtgaatggaatctttagtcacattgtaaccgcttcttagaacaagaatagccacaatgatactagccaatggatctgcccagccccatccaaagaagatgataagtatggcagctaaaatggcacctacagagccgagcatatcgcttattacatgtaaataagctcctcttatattcagattattctttgtatctccgccactcatcataatccaagcgaccaatagattcacaactaacccgatgatactaattgtaagcatgccggttgctgctacttttggtggattagagaagcgttcgattgcttcataaatgatataaagagaaataagaattaaggcagcaccgtttatcacagctgcaagaatctcaaatcgtttatagccgaatgtcttattgtgatttgcctttttttcagctaatgtaaaagcaatcagggcaaccattaatgaaattgaatcactcagcatatggcctgcatcagataaaagcgccagactatttgttaaaaatccacctatagcttctattatcatataacctgtaatcatgataaaagagatcaataaaacctttttatttgctccttcattatgattgtgacccataaaaaactcctccttaactaaagtttttaatacatatgtatttattatttcaaatctgttatgaagcattctaacatgatgcaaataatatttatatatgagcatgtgttcatatataaatatatctgctctttactgaaatgtcaaaatattttttatagaaatcaacaatacctccttaattattctcttattaacataaaaaagcggaacaaacacatggtttgctccgctaacctagtttctctatccttttcttgtagtatgcaactacaatttacctgttaaaaattaggcctcaccaagtccaaaactccagtcagcattatcattttcaacaatagatacaattaaatcagttgatgcgataccacactcagattccagtctttcggctaacagcctgtagaatttttgtttcttctcttccggtcgggatttacttgtaacagaaagaacaacaagatttttggttcggttaaatcctaagcctgtatcctcaataatcatatgattttctggatgttcatgcacaatttgataacggtcctgttgaggcacatcaaaagcctctactacaacattgtgagcgacatctaaaagttttttcaaacttgattgatctcgcccttctattaagtcaaaacgaagtaatgacataaaatcccctctttctactgtcagatatttctaatcatctgctacataatgtgctcatttttattcttactacattagaataaaataatttcccaataaccccttcattctgttgttagtcaagcctatgttatgatgtgtatttccataggcaatatacagaatcaacttcgagtaattaaccattttttgaaatagccttatcacttactctagaaatcatttattcttctaagctttagtttacatgaagctctgctatcatatataattcaaaattaagatggaagacatctcaaaatcagatatcaattatggaggactgcatgaatattcagttgttacaggtttttctcactactgctcgtgaaggcagtatttccaaggctgctcagactttaaattatgcacaatcgaatgtaacgaataagatacaacaactagaaaacgatttacagacaaaattattctatcgccatagtcgaggaatcacacttactcccccagggcaaattcttgtttcttactcagagaaaattctacatactattgaagaagctagagcagccatgggcgaatcatccgcgccttctgggccactgcgtataggatcaatggaaacaacagctgcagtttggcttcctcaactccttgcacattataataacctctatccaaatgttgatttgaacctagtaaccggtcctacggaacaacaaatacaagcagttttacattatgagttaaacggcgcttttatttcagggcctattgaacaccctgatttagttcaagaaaaggtattggatgaagagatggttcttgttacaagtgcttcacaccctgtgatttcttccattcaggatgttcaaacacaaacaatgcttgtattccgtaaaggatgctcttacagagcaaagctcaatcatatcctccaagaagaaggtttattacctataaaattaatggaatttggcatacttgaagcgatcattggctgtgtaagcgccggcttggggatttcactgctgcctctttcaatcattgcttcgcatgaaaaagaaggccgcatccgcagccacactatctctgacaaatattctttcgtatcaactatgtttataaggcggaaagacactttaattacccctgctttatctgcttttttaacgcatatgagggatcattttcagataaagaggccagatcaatcgtaaataaatggatggaaggcatgcttcgcctcaaaatacccctgatcagttgtctgatataaaaatataggcgcatctcaatgtttgtatagagcaaaaaagcaaacttcggtatgtagtttgctttttcttcgtgattttgcactcagaatcgtgaaacctagtcgatattaggatgtagattttcctcattcaaagaattttgaacgaaggtcattgccctagacacttggttgcgtcttgaagttaaaggctgactatttcctaaagcgtcaatcgctctcacaactattaaatattcacctacagatttcgggtgacaacgggaagattgatattttcggttggacaggggcagaacatccaattgtaacagttgaagtatccactgatggaggagatcctgcagatctgagtgatattgctgttaattgatcaacttgtttttgttcggaatatactcagtatatagccgcatattcctcctgcaatagctggaatgagccaccccagccctatgttatacatagggagaatctgagagaaaatatgattcacaacttcaatttttattcccgcctccttcaaaccgtcaaataagctgatgatgaatgcgaataataaactgccttgatacacttctgtcttccctttaaatacagaatgcaaaaacgttaaaaatattaaggaaatcgcgataggatacattgtcagtaagacaggcattgacaccttaatgagctgggttaatcctatatttgcgacaagcgtactaaacactgataaaacgacagcaatttttttataagaaatgttcggaaatagttcatgaaaaaatgaagaacacgcagtgatcagtccgacacttgtcgtcagacacgccactgtaatcattaagcccaataagattgaaccataagaaccaaaataataggatgaaaccttagccaaaacctctgctccattttctaaaatccccagttcttcaacgctggaagcccccatataggaaagggctgtatacataactgctaagagtacagctgcaatcgcggctgcttttgcacaaacacccatcagctgttttttggtagaagctccttgttctttcaatgcattcacgatgataattccaaaaacaaatgctacaagggcatccagagtgaggtatccttcctgaaatcctttaaaaaacgcttgtgatgtgtacccttttgatggtgcttgaatggttccaattgggcgaataagagctaccactacaagcaatccgataaatgtcagcttaattggcgtcaaaaatttcccaactatatcaatgatttttgaaggattgagtgataacaagcatgccaatgcgaaaaataatattgtaaataagattaatgagacagggcctgcatcatttgataaaaaaggttttaccccaatttcaaacgatacgtttcctgatcttgggatagcgaaaaaaggcccgattgccaaatagagaatcgtcgtaaatacaatgccaaacaccgggtgaacacggctggctaacgactgtaagttttgtttacccgaaaaaacaaatgctgttatagccagtaacggcaatccaactccggtcactaagaaacctgcattagcgacccatacatttttcccagccatttgaccaagcataggcggaaaaatgaggtttcctgctccaaaaaacaatgcaaatagcattaatcctataatgatgatataggaagcagacactttttttgacattatatatcctccgattaaagtagacacttcttgaatagccaggaaacattacagatgctatttgcactggcgcagtgttgattccaaaataagtttgtgtcagttttatatatttttatcaagttcaacaaaagcatgatcattttgatcgtttccgatatcggttaaaaaaccaattgcaccaaaaccatataaacaacggttccccccgctatggaaagaagcatatttttcttccacaagtgaagcagtacaactgcagctgctccaaccaattcaggaatgccatgactttcagaaagcagactcacatcttttaaacaataaatgaccaaaagcccgattaccgctgatggcagcactttaccaagatattgtacatatttcggtgtcggtttgccagacgggaaaatcatgaatggaaggaaccgtgtcagcattgttccaagcacgaccattgcaatggtgatcatttgctgcgtcatagtcatcgtcatacggaaacctcagctttctccaatggttttctcagaacagtcagtacccctaaaatggcgagcatagcaggaataataaattggtttccgccaaaaaggataagacaggctactgaaagtccaagtcctgagagagcactgtaatgctttttctctttcatccattgttctatgaatatcacaataaacagagcagtcatcacaaaatcaagcccttcggtattaaacttcacgtacgacccaaaaatacctcctatcgctgcccccgcgacccaatataaatgattaagcagtgtcacaaaaaacataaaccagcccttgtcaacattcgccggaacattagcggtataattgatagaaaatgattcatcgcacattccgaaaatcagataaagctttttctttccagtccccctgtacttatccaacatggaaattccataaaacaaatgccgggcattgaccattaatgtcaaaaaaagagcattcatagggttgaacgcaccaagtaaaaaattcgctgcaacaaactccattgagcccgcaaatatcataaaactcatgatgattggatagattgcgctaaatcccaaagaatgcataaagattccataagctatccccaaaaataaaaaccccgcaaaaatcggaattgtatatgggaatgcagaacgaaatgcagcccatatttgacttctcttattcatatgagtgtttatagcaggagagcttaaatgtaacgattctttatttttattcaaatcaacaacctcctacatttcatcaattggcacacttacagttcttttttctgtactcatgactatgcttgtgtcaactccactaatagcagggttctgcattaatgaatcaatgataaaattccgataactctccatgtccttcgccacaatcttaagcatatagtcatggcttcctgtaagtgtgtagcattcttgtacctgtgggaatttgtttatatcctctaaaaatgaatgaattgtctccctatttaagggtgataagttgatgagagctagtgctgtgacttcgattccaagttttttctcatcaacaatagtcgtaaactttttaattatacctgcttctactaggttctttgttcttgcaaggcaagctgatggtgaaagcccaattttcttagataaattcagatttgatattgaagcatcttcctgcaattctcttaagatggccttatcagtttcgtcaagcataatacccatttcataacccccaatacgacttaacagaattacatttcatccgatttaaacaataacgaattttcattcgataatcaaatattttttaaatttaattccttttaaaatattattcacagaataaaattatccccatgattacctcataattaaattaacttacatcagaaagaagtcatgggagagttatgtacttgtgtgacttgataccaacatcataagaaacttatcagaagccaaaaagttattgcggtctcaccgaaaattgaatttgcggtgccctattgcctttttctgcgaacaaaaattgttaaaattcacaaaacagaaagtctactctattattattttaaattcgtcctctagttcctcttgagcctcttgtaaaacttctaatacatcatctgcgtatgaacctaaaaatgtattgctgaactcaaaatttttcaagactaaagtgagcggcaaatccacccaccctgtcaggcaatcccataaagcgtctaaatttctcccatagtagtctgggaagtctagtttatcttttaaaacatcatgtaaaacttctatattttcaaagtctcttccatctatcattatttttctcattagaaactatgccctccattattttatcttaacaaacgttttctttgtaacagctgtttgtccaaatgaggctgaaaacaaataaaaaacaccgatagggggaaactattggtgtttacaagacattttcatgcccggtaggcataaataatgctaaactttgtttttgaaaagctatcatatcaaatttttatgttacagcttttactatcgtttaatctaattgaggagtaaaacgaaatatgtttgaaaatcacatatccccaaaaaattaaaaactaagcggcagttcttcgattgctctcatcagaaaattccctttccatttcatttgttccttttcgccttttaactgtatatttggacagcggcgtaataaggtggaaatcgcaatcttggcttctaagcgggctaactgtgcaccaaggcaaaaatgattgccatggccaaaagcaatatggcggttgttctttctttcaatatcaaatatgtcggcatttggaaatatcttctcatcacggtttgctgatgctaaagaaatgatgatcacatctttccgtttaatctcctgcccatgcagtataaacggttcagccgtccagcgaattgtcgttagctcaactgggctgtgaaaccgcaatgcttcttctatggctgaattcatcaagtctggctgctggcggagcttttcaaattgatcaccgtgacacatcagagcatatgtcatattggtgattaagtttacggttgtttcatgacctgcaacgataagcagcataatcatcgagtacaattcttctgtacttaattgtgtgccttcactttccgcttgaattaatgcactgattaaatctcctgcaggttctctcctttttttgcgaactaaggattccagatattcaacaaactcccctaacaagtggtcattctcctgaagtctttcaggggcatctgaaaaatcaataattacttgcgaccacactctgaatttttgacgatcttccaagggaatgccgagcatttcacttatcacgataatcggcaatggaaacgcataatcgtctactaggttcatgaatttgttgggctgcactttatccaataaagaatctgcgatatgctggattttgtcttccaactgcaaaatcatccgatgcgtaaatgctttttgaacaagagttcgcaagcgattgtgatccgggggatctgaattaagcatatgttttgttaaagactcttcattcttcaatagagcaggacgtttttcttttgcggtaaatacattttcatagtttttctttaatttttcattctttaataaatgtattgcatcatcatatctcgatatgagccagcctttccccagagatcctaaagataatgggtagagaggctgtgattttcgcaattctttataaaattcatacgcttcatctttaaatgctctcgaagacaattgactttccgtcaagatggttacactctttttttcttttgaagacattcattcgacctccatctttatgaaaggttatgttaatctttaaatatataatcagtacgatttgtaaaatgatctattgagatcagtattcatgctaagggccaaaatgccgcccccgcattttgaaataaaaggtatgagacagtcattaatcattttgctgcccaaactctttccctgataagatggcgaaactcctaatacttctaaataccatgccggctcttttaagtatttggaatattttccaacttcattagtcacagtcactgtcaacatgttcaatactgaaaatcctcccattttgattaatgttatcccccctgctgctatataatcgatcaagttaatgtcgggtttatcacgatgttttaatagagcggcaacaaccatttcaccattactgaatgtcaacaaaaaagaaatgctttttaaaatatgctcttgtcagtactttatgcatttcaaaaataaatgaatgatctttttttcgcgttttacgagtaaatccataaaaggatattgattgaaagattcatggagtagctttgccacttagcttattcatctgccctagcttgtcgataaagaaacattgatacatctcctctgagcaagtaaagaaggaaatcgaattaaagcgcccttcctattggaaaggcgcctgccgttttactgtgccaaaatgtttttcatcagtgagtttttataaaatcatttattaattgatcagttgtcaatattgtggcaaattcatcatgcaatgtagctagagatatattatgaatagtcgccgcatcataatatgtatcattttggtctctcattccgaaggctgctgttgcatctgaaatcaggtatgtatcaaaccctaaattaccactcattcttgtggtggttgatacacagtgaggcgtggttaaaccagttatgactacagtgtttatttcatttaattttaagaattcttctaaattcgtaccaataaagctgctatttactgtcttggttataatgacttcttcatccataggcttaactatttcctttatcgcaaacccttcattctttggatggaataaagaatgaggtttatcagaagtgtgttgtatgtatatgactgtccatcctttttctctccataattttagtattttactaatattttcttccgcctttacgttattccgttccccccattttttatcatcgaaggctttttgtacatccacaatgattaaagcttttttcttttcttccacaagataccctcctacgtagaatttctatttattactacattctaaatacaaattttacttttgtacaattgtttaatgatgaatttcgaatgagcgccttctttattgaaaaatgcgttctaaactgcaactgtgcccaagccgttaaccttcaataatctaatctgagaatcactggctctacagagaatgataaaaagcactctaataacgagtgccgaaatgaaaaactattgatttagaagccatttgatacgctcagctgaaaagatgtagtggagtattattagacataaaaagacaataccaactggttttaaatgactaaaataaagcgctgcaacagccagtgcaaagatcaataattcaataactagccttgttaccccgtttacagctattacagtttgtccacttcgactaggatcattaggtactgcaaatacagaccagacaatcataactgcaataggtaaaacccaagttaaaacatatttaaaataaccattaaagcttatccaagcaaacacccctaaggagattagtgcagccatttcaagggtgaatcttaaaagtaaattagtctgattcagtttttccaactcctctataaaaaacacccccgcaggagatgctctttctctgctttatttcagcgtataaaaacttttctgttcttcctatttagattctattgtagttttcggcgagattacctctacttttgaaaagatgataccgactgctgctgttaccaatgctccgataatagaacgatgataagtataatgaaatatgacaacttttcccctcctatccagttaattatccaaataatcaggaagttgtctacaatttgcagaatttgtcgaacgaagtaaagaatataccataaaagctgaatattgacctcgcttatcgctgggaggctttactcattgtatgaattacagtaatacactaccttcccttttgagaagacgttcctctcttatatccatttgttgcaacttagctagactcttccaataggcttccttttggcgcagctgcttctagtcgaaattgagcaacacctgaatgtttcattggaatttctgaaccatagatcgttgctgaatttgttgcaaatgcatacataggagtagtcgaatggtggttgaaaaatgaaatgaattacccacctccagtgatggcagaaaaagcgggggttttgttagagaggaatctatagacatgtgtatctagaagatttgacagcattaaaatttatacttacatcgttgggaacaggccaacaataaagcggaagaacgtagtcatttgaagtggtttggaataaaaatgattcgaatatgttcttatcattgataaacgaacaaaaaaagaacatgttttgaaaaaagattgatcaaaacatcttcttatatgttgtcatagcgtaactttttataaaaaggttgattacattttcggggcttccaaaccaaattttgcccattcttcttttgctggaccataaatacctgaaacagttaaacctgcttgtctcataagaacagtcatttgtccccgatggtggttttgatgttgaattaaaaacatcaaaagtgaaccgttaggcaattgttgtccaataaagttgatacgttcttgaagtgtatggtcagtccattgggtttttaatgcctgtacaaatgcattactggcttgatgatagctgtcagctataaactgagccgaagttggaacaggataatcttcagctggggcatggaacgttaagtctgtgtttgaggtaatgatgcgaatagcagcaacagtgtgccaggcaatacggcctagagtccaattttgtgaagttatttcttgattaagtgattcatcagtcagactatttaatagtttctgtgtagcatctgcttcgaactcccaagatttcaaaaaatggtctaaggtttgaaacacaaaaatcctcctttttattcttttgttttttcaatgtgcctataggttaattataatgcctcgtttcgttaaaaagaacaaaaattttggacaagaataatcatagtaaaatgcgtagaccttcttaaacataacgatttacgcatctttttacaaacatggtgactccttggtctccattgtcagcgagaatcaaatatcatatgaaaacaatcctatattcttattactttactgagcaataaatctcttcggtatacttagtgatgccttcatcgtaatcaggatactgatatgtaagactttctgatacagcttttgaatactttctaaataatgcatagcaagtaaataaagacttccacatttcctgatacccattcacagaatatgtagacatgagttcctcccattctttatttgaaaggtaccgtttcataaatttatagttcttccccatactaaatgaataccctttctgagatgcgatatgccaggccatcattctcaataaattaggacgtacaatttcatttaaatggtcaatggcaaaaaggatttcatttcttgctagtccttttactacgtaagtcgaaaccatccagaactcattacagcaatcatcaaattcccttgcagtcggctttttcatccagtattggcgatcatttggggtcactttatagttgatgaacgaatccttatcgagcaagaccttaaccaaaccatcgttattagcaaaataatcttctgcttcacgaattggaataagggttagatctaatttgttcccatcctcaaaaagaatgatgtatgaaaaccaattacctaattcgggaggaaaaagctccatatcttctggtttttgcatcataatgcgcttcccaaagatttcgagccactgatcattttctttaaaagaatctacatcagttacaaaatacgagatgtcataatcttggaagttgtcaggagggatatttctgtttgtacgtgacccttccaaagtgaccaatcggattctctcatcgttcaaagcaaagtccaaaaaaatgtccatcatttcctgctcacttcgcattacatgttcctccgtttcagccttaatatctaactgtaaaaccgaatattgatctgtacgtcttatagatttttttactcttgaatgtgatgtattcttctaagctttattttacatgatgttctcctatatattattcaatattaagatgcaagacatctcaaaatcagatatcaactatgacggactacatgaatattcagttttttgtagagccgccatgggacgacactatctttgacacactttaatcccccctgctttatcgacatgttaactggtatgagagattgacaaaaagaaggaaaacgatatatttaagcgaatacgagtttttgagtaaattttaaaatgacacttttttcaaaaatcatgtcttaacggggggattcggtatgaatgaatttatgaagaagttttccttaacaaaaccgattattcaagctccaatggctggcggtattacaaagccccgacttgcatctgcagtttcgaatcaaggtgctcttggcagcttagcatcggggtatcttacgccagacctgctagaacaacagataaaagaaatgtttgagctgacagacgctccttttcaaattaatgtgtttgttccgcttggtctagaaatgccaccaaaagatcagattaaaaagtggaaagaaaacataccgttagctaatcaagtaaatcaattcacatctgtacaagaagagtgggatgacttctatcaaaaaattgatctaattttaaaatacaaggttaaggcttgctcattcacttttgatctgccgcctgaagacgcagtaaaggagctaaaaaccgctggatgctgtttaataggaaccgcttcaacagtagaagaagcattgttaatggaagaacggggaatggatatagtagtccttcaaggaagtgaagccggtggacatcgcggagcatttttaccttccaaaggtgaatctgccgtaggtttaatggctctgattccacaagcagcagatgcactgagcgtacctgtcatagctgctgggggaataatagaccacagaggagtaaaagcagctttaaccctcggagcccaaggcgttcaaatcggttctgcctttttaatttgtcacgagagtaacgcacatccagtgcataaacagaaaatactagaagcaaacgaagcagatacaaagcttacgacattattttcaggtaaagaggccagaggaatcgtaaataaatggatggaagaaaaagaacagtttgagacacaaacccttccgtacccttatcaaaatacactaacgaaggcaatgagacagaaggcttcacttcaaaataaccatgatcagatgtctttatgggcaggtcaagggatacggtcattgactgaggaaatttcggttaagcagcttttaaatcagctttgccaagaggatataaaaatataggcgcacctcattgatagagcaaaaagcaaacttcgacaggcagtttgcttttttttcgtaatttcatcccctgactttggaaatttaaatactcctacattttcaaagctaattgaatcgggttatcaatcatcccactgatacggtgcgatcttgatgatttcaccacaatacatcaccaacatttcgatcttatctccccttctccagttttgctccctattcgaaaaatcgatagctcccatattaaattcgaatagtaaaatggttctttttcgtttgattcagatgatataaagtcatatgataaaaaaagaatgagacagaaagcgtgagaagtgatgaaaataggattttttgattcaggaattggtggcatgactgtattgtatgaggccataaaagttcttccttatgaagattacattttttatgcagatacgttaaacgttccatacggtgaaaaatcaaagattaaagttaaagaatatattttcaatgcagctgaatttctggccagtcaaaatatcaaagctctggttattgcgtgtaatacagctactagcattgcgatagaggatcttcggagaaacttcgactttccgataatcggaatcgaacccgctgtaaagcctgctataaataaatgtacagaggaaagaaaaagagttctggtagttgctactaatttgacgcttaaagaagagaaatttcataatctagttaaagaaattgatcaccatgaccttgttgattgcttagctcttccaggactagttgaatttgctgagaactttgattttagtgaagacaaaatcattaaatatctaaagaacgaactatcttcttttgatctgaaacaatatggaacgattgtgttaggatgcactcattttccgtttttcaaaaacagttttgaaaaactgtttgggataaaagttgatatgatttcaggcagtgtcggtactgcaaaacagttgaaaaaagttcttgcagatcgtaatcagcttggtaaaggctcgggctcaatcacctttttcaattctggccataaaattgtagaccaagaagtcatatcaaagtacaaaagattgtttgaaatattagatgaaaatcaaaggagtcatgttggacattgaatgtaaggggctctggttataaacaatttttcagtaaattcacaaaagagagaagtatgaattcgggtttgttatccaatgtaaatgaaaaagacagtctcatgaagaaaaacatgaactaagaagcgggcttaaaaagcccactttttttctaacaaacaattgagttatgcacaaatatctgattacagtgttttcgctctttcccctcttatttctaccccatctctatagcttttctatttcaataaaacacaagtctcgattgaaaagttatcgtaacatttacacttcacaggacatttttcgagattagaaatcgaccgtttgccagatacacaaagtcataatgtgtaaattctgtgtctatttgcatgtttattatggaattattttcataatgttttataatacaagatgatagcgttttctaattataatgatagggggaaataatgatgatgaaaaaaggactgctcgcgggtgcgcttacggcaactgtgctttttggcacatgtgcagtagatgtgccgggtattattagtccaaaaaccgcagaagctgcatcacagctaactgatggaatcggcggaagggcttacttgaacagcactggtgccatttttgttacgaaaatccagcttcctagctccattcaggtttcaaatgggacagcctacatctactctggctttagcgggggcacagaatccgatatcgggcttcagtacagtgataaatataatgtatggaaaccatatatgaaagtcggttcaaaaggacaggatcaggttcagtacctcgaaggaggaagccaattcacgaatacgaaaggcttccgtcccggcagcaccgtacaacttaccatctacaaaaaccttaacggcaatacacgcgctacatactggggcacaaacaatgcgggatacaacggccgtctcatttcagagatcagcaaaacaaatgtcggctccatctccaaatggaaagcgctcgctacagttgcaacaacaggttcacgccaatctatcaaatcaaacttttcaacatcttttacaaacatcaccatcgacaacaaagcaataacacctgtaattgatacacaagacttcgctaaagtaacagtctcaggcaacagtgtcagtttatccgttgtgaaaaattaaaacatgttaaacatacaatgcgttaggctattgagaagctctcgatagtcttaaagggggcttaacatgccccttttttcatttcaatttaactttcagttagcttcggtgcatgccgtctatccccgtcttttatctgggtgaagtaaggagcagctcgccccttctgagcctgttccatttgctcaacgcaaaaggtgtgcattactgtcttaaaaatgttaaaacaaatggcagatggtgcactttatttttagatgaggcatgcttacgctcgatatgcaagtcaaatgattaagggtctgcaagagagagaagttttgggtgtactttcataaaagagggatgtcttcatatagctcgattgcaccaggaacattaaccagcgattggccgagaacaacacatcactttgaaacggattcattccaaaataataagtatgatcaataactaataaagatcagttagcagtccagccttaaaaatatttttacatcaagtaaactagcatcactatcgaataagctcgatctgcatatcatgtactatcctcttttaaggaaggtgatgttatgaggtcatttccattaattgtagttctattcatcctattaatcatcgttgggacatctttctttggtggctattaagaacacaccttacctcatatccatcagacgccataagaaatctttatggtgtctgttttttattagatttaaacaaaaccattaaagtggggccatgcaaacacacctatggagattactgccacgacttctttgtgagggaaatattcttccctttatggactattgtcgatcaaaagagaaagttgaaatacctttttatggtgagatgaatcgaggcttagacatataaaaaaccgcaaagctttcttgaagaagctttgcggtctttgggtctcttctttgcttcatataagccaatagatttcaagcgtaatccactgccatacatccaatgattttttattttgaaataggtttcttctactcttcctgtgagatgactcaaggtatgccacgtcacaataatgtggcggatcctgagtggtctcaatcagttttttccccattctatcaattctccacagaaaaaatggctatggcagaacaactttcatagagtaatcatcatttaatgagccatcatctcatgggcaatatcgtgtccatccatttttgacgggtagtaggtaggccaatttttgacttcatcaagtaaagcttcacggtcgtccccccaatagagatgataatgactagctttagtcgggtaaatactatgatcactaaactgaatatactgaggcagctcttctgcttttttagctagtttgaatatgtatcttacccctctattgcccgcatcataggtgagaatttcgtacccgtcatacgtatacttaccagaatattcttttccatttttgaagaacgttacagtatctttctggattacaatacggtcaacatctgtttgatagccttttttataatactctttatattcttcagctgtcttgccgccttcgtgttctgatttatatgaaaacacttcgtcaagagtaccatcttgcaggtatggatatacagattgccaatctccttcccaatcagaaagtaagcgatcctttacttggctgtttttaaaatagccttcatatattttttctgtttcttcatcatgcgcatgactatgatcgtgagaatgttcttgtgtatgactgtcagatgtttgctcttgcgttttggaagagtcttcttcaactgctgaggatgatgttgtttgattagactcacctgcagaagaaccggaagtctgacatcctgccaatacgagtaatgaaccaatcgttaatatgcctagccgctttgaaaataaaatgttcattccaacactcctttttattaaatcgaaaacattacgatttatattatacatacatctcttgcaaacatcaaagggaaaatgctcttcatgcggatggactattttaaaggaataactgactttgttcatcagttattcctttaaaatacgaaagtctacgatatttccatatcgatccgcttcaatattacagcacccctcaagcagctgttttaattttccccgtccgcgttgtacccttgattttgctcctgagtaagaaatgccgagcttttcactcaactctttctgtgataacccctgaaattcagttaactcgagcgcctctcgatacttttcaggcaaccgtttgatggtcgatcgaatacacacagttgcttccttggtgaaattttcttcctctgcacggttattaaaatgtagatcatcaggcaatatttcgcttgttttttttgtacggtaaaaatcaataatcgtatttctagtgatccgataaatccagctgtcgatcttttgttcatcgatcagatttgggagatgcacttgtattttcataaatacgatttgcaagaggtcatcaacgatagattgatcgttaaccctttgtgaaatatatgtttttaacggctgatgaaattgatcccatagatcctctatattcatttgaaaaaacctcctataattttgcgtctgctttacatttgcttcgtctttttaatcgtaacaaagagcgaaacaattgttgaatcaattgtattgcagctgttgcaaaaaataatgataaaggagaggtttgttgtggagtatacctatttagggagaacaggattgcgggtgagccgtttatgtttaggcacgatgaattttggagttgatacagacgaaaagactgcgttccgtatcatggatgaagcgcttgataacggcatccaattttttgatactgccaatatttacggctggggcaaaaacgcaggattgacagagagcatcattggaaaatggtttgcacaaggaggacagcgccgcgagaaagttgttctggcgacaaaagtatatgaaccgatttctgatccgaatgacgggccaaatgatatgaggggcttgtctctatacaaaatcagacgtcacctggaaggatcactgaagcggcttcagacagatcatatcgaattgtaccaaatgcatcatatcgataggcggacaccgtgggatgagatatgggaagcttttgagactcaggttcgctccggcaaagtagactatattggatccagtaattttgcaggctggcatttagttaaagcgcaagctgaagctgaaaaacggcgattcatgggactcgtcactgaacagcataagtatagtttattagaacgaacagctgagatggaagtgctgccggctgcacgggatcttggtttaggagtagtggcgtggagtccccttgcaggagggcttcttggcgggaaggcattgaaaagcaatgccggaactcgtacagcaaaaagagcagatttaattgaaaaacatcgtttgcaactcgagaaattttcagatttatgcaaagaactaggagaaaaagaagcaaatgtggctttggcatgggtgctggcaaatccagttttaactgcgccgatcatcggaccccgaacggttgagcagctgcgtgatacgataaaagccgttgaaatcagtctggataaggagattctccgcatgttaaatgatatctttcccggacctggaggagagacacctgaggcatacgcctggtgatacattcattactcaatactgacatttttcttaaatatttatactgaactatcatattaggaaagacaagagcttgtttgtctcttgtcttttccacatcatgttgaaaatgctggctaaacatcgacaaaaatgctgccgcttctaaaaaagaaccctaaacaatagagtaactggaaagacaactggcttgatcagcttgggacccctttcagctgtatttaaatcaatcaaactaatgattcattggcagtctaaatattattattgtttgtttacaaaatagtaatagcccctgtaatgattgctaacaacgtaataactaatgatgtaattacagcccacttaacggcaaacctttgaaatgaccccaagtccattttaagcatacttactaacagtagtgttgacgcaactaatggactcatcagatgaaccggctgccccattatagaagccctcgcaatttctactggttctataccatatgctgaggcagcttctgcaaagataggtaccataccaaagtaatatgcatcatttgataaaacaaaagtaaacggaatactagtgagtgctacaataacggggaaaaaccctcccattgatgagggaataacggatattaatgatcctgctatggcatccaccatctttgtcccggataatataccagcaaatactcctgctgaaaataccaataatactacagttatggcattaccagaatgctcggcgattcgctccttctgcatttttacattcggataatttatagtaagggcaagaacaaaaccaattaaaaataaaactgacggatgcttagttccaagcacaataaacaccatgatacttataacgaggaataaattaagatatattaagcgtggccttttcaattgctcgctctccaaactagcagccatataagattgagagctgtcctttgttatatgtctaggctctaattgaacgatgcctattcgattcctctctttccttcccattagaaaagccagaaatatcacacaagcaatacctccaagcatggtcggaagtaatggcacaaaaaaatctgaaggatccaaacccagcactgaaatcgctcttgtagctggtccgccccatggagtcattccgctaacgatactcaacgacagcattgctaatgtcgccataaccatgggattcataccaattcttttatacaaaggtaacattgctgagactgttatcatataggttgttgtaccgtccccatctaaagcgataagcattgccaagacggcagaccctatcgctattttcacagggtctccctttactatagataaaattttttctattagcggatcaaataaacctgcatcaattaaaattccgaaaaaaagaatagcaaacaatagcaatgccgctgaacttgcaactgtttgaattccttctaaaatcatgtcgccaatacccttaccaaaacctccaataagagcaaaaacaatgggagtgatggtcaaggcaacaataggcgagactttctttgtcattattaatattgtaaaaacagttaccatcgaaaaacctaaaatagtaagcatattacacctccaagaatgcgctttcaaatgacttttgattaacatatcttatacggtgtaataagttaaataaatatttttttactgtgtttcaaaaaaaattctatcataactttaaatggttaccatttgttcaccctttaaaaaatcaatgaatgctttaacgagtttgattcctaatgatttttgatcgtacattagccaagtatctctcattagaggcttacccttagcattatacagttccattgtgtacaaatgatcagattcctgcaggcaaatttctggtgctatggagtaaccaagaccatgctttaccatctctttgcaagtctcttgtcgatccacttccattgcaataatgggggcttgttttagattcgtatgcatccaatcttctataatcgtttttaaagaagcatccgttttatatttgataaaaggtaaaaaaggaagctgctctatcgttattggtttttttgagatgatatgtaatttttcccgtgtcagccgttcctccacccctttccagcgatggcttcctctcagtataccgacttgtacaataccagcatctaataatttcatgacatctgtgctccagcctgtttgtacactatattggacattaggatacatagtggaaaattcccttaataacttagggagcttatattgagcgaaattgcttgatacccccagccttagatgtccttgcacctctttgcttagattagagatatgatctttggtatcttgaagttcctgtagcattcttcttgcataagcaaccaagtgttctccttccgcagtaaaggtaattcctttatgccttttggtgaataattcaattccgaaaatctcctcaatcttattcaaccgataagtgatggaaggctgtgatgtaaataatcgttctgctgtttttgttacactttgttcttcgtgaagaattttcaataaaatccaatctttctcatccattttcatcttcctttctagtccttctttcacaattataaaagtttttttatcgaatattaagaaaacttatattttatttttatttttttaccttctacactaaaaaacataaaaaatactacctttaagatgaggatgatgacgatggtcaagacgaatgtaacaatcatgagaggcggaacaagcaaaggcgtttttttccacgaatcagccatgcctaacaataaaaacgaatgggagccctttttgcttgatgtcatgggaagtcctgataaaagacaaatagatggtttgggtggcggtaattcccttactagtaaagtggcaataataaagaaagcatatacttcggatattgatgttcactatactttcggtcaagtcagcatttcggaagaaaaggtggactttaaggggaactgcggaaatatctccgctgctgttggtccatttgctatcgaagaaggacttgtaaaagcgacagaaccaatgactgcggtaaggatcctgaataccaatacgaataaaatgatcattgcggaagtggaagtggaagacggtcaggtcaaatatgacggagatgttacgatatctggagtgcctggatctggatctccaatctatttaaactttcatgatgccgctggttcagttaccggtcatttattgcctactggaaatagttcggagtttttagatacaagtcaaggccaaatagaggtgtctattatcgactatgcaaatccattagtttttgtggaagccagcagtatcggcctggagggaacggaacttgcagaagaatttactgatttacagttggctcaatttgaagaattaagatccattgcggcagagaaatgcggctttgccagtcgattttcagctacaaagttatcgccggctgtccccaaactggctatagtagcaaaaccagagaaatataaagatagtacaggtgcttggcattcaagcgttgagatggacttacacatcaggatgatgtccatgcaaaagccacatcaagcactggctgtcactggagcgatatgtacaacaagagccctttcagtggaaggtgcaatccctgcaagaatagcaaaaaaccactctacaaaggttcggctagctcattcttctggtattattgaaacaatggtggagcccactggtataaagatcgtccgtaccgcacgacgtattatggacggaacagtttatacgcatggagactatcaaatgatgtagatggactgtgcaaaaagcctccccctttccatcgttaatagatggattgaatgcgccttcttgcacagatccattgtaatcttgcatggctttaaaaaagcctctatattgtattttatgaaatcgccaaggtcctttcatgtatctgcctcaagcatgacataatcattatagagaaaattgaatactttttactgcaaataaaaagataccaacatcattggtatcttttagattgagttcatctgcagcggtttcttttcctcactgcttatttgattacaaaattaccgtactcgtttgaacgaacatgaatcggtccgtttagattatagttgttctccttggcgatagagcgaagcacgtccacacgggcaactgattctctccattcgtcacgggtgtcatgattggccggattcatcagatcgtcatagcgtacgtccaagaatttattcaaccacttcttctcgtctattccgtctttaggtgatccgcccgcttttttgttcgtacgtttaatcaaggcataaaaagagtcagggtcatcaccatcgccatgctgaataaccgtatcgtacatcacagctctagccaatgctgtttttagtccggcattatccgatcgtttcatggcaggctgataatacaaatggtcatttactttgtcttgagcggcgcgaaattccttatcatttgcaagcgacttccaggcagaagcgaatcccttgagattgcttgtatcatcgctttcttccttggccagacggcgcaattcagtcagatactttttcagtttgttattcggaactgcctttgtgtatacttctactacttccaatgcatccccggtagccgttgtaaagcccgcccgtccgcatgtatagcctcgcccgtcatccaatcgctctacatatccatattggatctccgttgtgccgttttcaaagatacttgtcagctgttccgcccggcgcttttgatctttattcagtcccgccgcaaaaaccgtttcgctcatcatcagggtaaaaaacatggtgaaaacaagtaatgagatcgctgcttttttccaaaaatctgctttttgcatactgattttcattttacttcccctttctaaatattgtaaatacagactcagtatacatgatgaaactgccctattgttgaaaatacatcaatttgtaaatattttgaatctaaagtaatatagcttgaatcttactcttttcattgccaatcagccttagcccctctcactgggaaggtccctttcatactgcttcaactttcattaacaagatgccataggctttactctattttataatggaagtgatcatcgaaaatcgttagggaggtgatgtaaatggcaagcaagatgagaatgccagattccgcaacgtcccatgcaaagcctactattgggaaggcgatactttgcatggggtagactttctaaaagatcgcccaagtaagcttttctgatatagtggctttgcaccttatttgacataaaaaaataaggagctggcagaaatggcatatgtaaaagcaaccgctattttacctgaaaagctgatatcggaaattcaaaagtatgttcaaggaaaaacaatatatatccctaaacctgaatcctctcatcaaaaatggggtgcgtgttcaggaacaagaaagctgatcgatgacagaaacgcttctattaaaaaagcatttaaaaacggcaaaaccattcatcaattatctgatgaatatcacctctctattgaaacaataaaaaaaattgtctactctaaataaacaaaacggaagcactgataaaaaataatcagtgctttttatatggcgagtttgtttcttagttatttcctgcatatgataccattggccaattgtgtaaagttaagggagatgagaagaaaggaaggtcctacaaatgacgataaacaatggaacgttgcaagtacccggcgcgaacatccactatcaggtgcgtggctcaggtccaatcattcttttggtccacggcggaggcggtgatgccgacaagttccatcatgttgccaatcatctggctaactggtactcggttgttacttacgatcgccgcggccattcccgcagcaatctcgccaatcagattgaggattaccgtgtggaaacacacagtgacgatgctcaccgtcttctagccaaaatcaccaataagccggcctatgtatttggaagcagctccggggctgttatcgggcttgatctgtgcatacgccatcccgaacaagtacatgtcatgatcccacacgaaccaatcttattgcagcttctgcatggaaatgagctgaaacaagccgagcaattcatggaagaccttaagaaaaatcatcaaagtgaagtcattaagttcatgtcaagattagagacagacgaacaatcaaaggctgtgctgacaaagcggcttctcggcaattcaacgtatttcactgagtatgaaattcaaggaattctcagctatacattagatttcgaagcattaaaaactgtgtttacatcttcaccgatgaagatactcccagctggcggaagtgcttctcgggagctttttccttatcgttgcgcgaacgccctagcggaacaattggaaacagaatttgttgaattccccggaaatcatacggggtacacaatgtaccataaagaattttctgagaggttacacgacatgttagaaaaagaaaataaacatacgtgttcaaaataggacaggtaaaactaactatggaattggagaagatttcacgaagcgtaaaaagaacttttcactaacgagaacgcaatgtgagatgtttaaccaaagtgatattagggatttcatcgaaaaataggtttgtacattacgttctcctattgattatttcctatcttaattccgtattttataccattagatacaactctaaagcggctcgttattttgtcctcaacaacaaccagtgtctaacatcatgaatctcttttgaaaatcaccacaaatgcaggtatggaagacttcatcgcagcaaaaaccataccaactattgttgttggtatggttcgtcctagataggcccttaagaagagattctattgtacggagtatttagctaattgcatttgtaaccgacagggccgtctgaacctgtgtacacatatgtgtcagacacatatccaatattcacgacaccccgggaatctttccactggatttggtcccagatattactcgttccatacttccctgtaacagtcgttccataagcgtaacaataataaggaacacgggagccactcggaatggaaagcataataggataatttgtaccaggaccgctgcgcatattgacaggcgcaccgctgcttgttgagacagtaaagtactgcacggcaagtgcctgactggaaaaaatgaataaagatgcaatcatcacggttaacatactcagcattttcagtttagtcaatgtcatccctctttcttcaattccttcattttaagaaacgatagaacaatgctaccagctgcatttaggaacaaccggaccgtctgagcctgtatacatatatgtatcagagacaaatccaggaacgatctccccgctggcaagcgtccgctctgtgtaattccaaatgttactcgttccatactttccagttacagttgtaccggttttgtagcaatagatcgggatgcgggttccgctcggaatagtcgttacaattccccaacttgtacctgggccgctgcgcatattgacaggagcaccgctgcttgttgaaaccgtataatactgagctgcaagtgcatggctagaaaaaatgaacacagatgcaatcatcaccgttagcatacttagcctctttagcttattcaccttataccctccccttataaatgccgtacgtttgactttcttacatccagttaaggatttactttcagataccatgccccctcccctctcatatatttatcaatgtaccataaactagatctttcaaaagtggaattattcctatgttttcgacaattaaggatacaaaataaatggtagtcaggcttgatattgatggtgtgttacatttggcatttgtccagtcggtaatcacgattgacaatcaggaaaaaggacatggatcaagcggtttcgtgtccaccaattaactcaatcagtgtacttctgccttgtatccacgcttcttctcgattcatagatactccacctttttcaccaatcaaaaacggacaccaaacaaatcagcgtaaatgctgcaagttcagtgtccgcaacctattatgactttgctttcttttaccagggcgtataaaaatgattaggtacgttatcaaacgttatattctatgattttgcgagtcgaaaaatcataacattttatatatttcaatcagattatgatctggatctctgaagtgagcaactcgggcactccattccttgcgatcatgcggtttatttacacatttaactcctttttcgtgtaaatcgtcatatgttttatcaacatcttctaccttaaactgaagcaaaaattttgattgagcttctccttccaacgattttttttcctctccaacgatttcagccatcgtttcacgagataaaagctctattttcgtttccccattatcaaagagtgcatattccatttcattctctaaccaacttattggaagtcctaatgaatctttgtaaaactccacgcttttcttaaaatcattcaccaacagtctaatttgtaacagcttcatatcgagtgcctcctataaaaccatactttttactggtcatccaatttaatgatacaaaaggaaacctgacagcactatgtcaagtttccataaataaatttcctacttcacctttatttcagatttaagtgcagtttattccatgtcataagaaatgtacgctaacgagcaaaaacagcgattcttaaaacaaaaaatgataccgagtgtattttctgtatgcttcaacttcatttcgggaaatgtaacgttgataaaggaggttacatcaatatggatcatcaaacattggcagctcacgaggctgttgacttacatgaaatcgtgaactttaaaacactttgtatagcgaaatcaaagttaatgcaaggacttgtgtttgaccaagaactgaaggacttgatgcaaaaagatgtacagcaatccattcaagaccttactgaattacaagcggtttatgagcgtgcctcatttcaggcccctgtccctcaaagccgcccaacgccaatcatcaattgaaaggaaggtaagcctctttgaataatgatcatttagaccccattaattcgctgaatgtgcctgaactagcagacactacattcgcgatggattttcttatacgagctaaggaaggcgtaaggaatactgctgtagctttgacagaaaccgcttcaccagatgtaagagccttgctgcggaaacagctgatgcaaggaattgcaatgcaccaagagattacggaactgatgatcagcaaaaaatggttccatccatatgagctgagcgaacagtataagctggatcagctctctgcaaaaaacacgatcatggtcggcaatatgaacctcttccctgatgaaacaaatcgtaaagggatgtttgaccggacacctgatgaacactaacactggaggttttacagcatgaaggcagtaacgtatcaaggcattaaaaatgttgttgtcaaagatgtccccgatccaaagattgaaaaatccgatgacatgattatcaaagtcaccagtacagccatttgcggatcagatttacatttaatccatggattcattccgaatatgcaagaagactatgtcatcggccatgaaccgatgggaatcgtcgaagaagttggttctggggtgactaaactaaaaaagggagatcgggtaattattccctttaatatagcatgcggggaatgctttttttgtaaaaaccagctggaaagccaatgtgatcagtctaatgacaatggggaaatgggtgcttatttcggctattcagggcaaactggcggttatccaggcgggcaagctgaatatttaagagtgccgtttgcgaattttacccattttaaaatccctgaatcttgtgaggaacccgatgagaaattaagcgtgattgccgatgccatgaccaccggcttttggagtgtggacaatgccggcgtaaaaaaaggcgatacagttatcgttctcggctgcggaccagtcggcctgtttgctcaaaagttttgttggctaaaaggcgcaaaacgcgtcatagcagtagactatgtaaactatcgcttacagcatgcgaaacgtacaaacaaagtagaaatcgttaattttgaagaccatgagaatacagggaattatttaaaggaaatcacgaaaggcggagcggatgtagtcattgacgctgttgggatggatggtaaaatgagcgatctcgagttccttgccagcggcttaaagcttcatggcggaacgatgagtgcattggtcattgcttcccaagctgttcgcaaaggaggaaccatacaaattacaggtgtgtatggaggcagatataacggttttccgttaggagatattatgcagcgaaacgtcaatatacgctctggacaggctcctgtgatccactatatgccgtacatgtttgaactagtatcgacaggcaaaattgatccgggagatgttgtcagccatgtcctgccgcttagtgaagccaagcatggctatgacatttttgattcaaaaatggatgattgtatcaaagttgtgttaaagccttaaaaaacggaggttacagaaatggaatacgccttacacgaagtgcttgaggttcaggaaatgactgcatttaagacactttgtttgacgaaatctaaaacaatgaaagcactggtatctgatccgaagctgaaagaaatcatgcagcaagatgttgatatcaccacacgccagctgcaggaatttgcctctattttatctaatgcaaagcacgaatgaggagatgaataaatcatgaatcctatcatagaatatctgactggcatgaatgttctaacagaccaaatcattgctatggacttattaatttcagcaaagaacggagtcagaaattatgcgatggcagccactgaagccggaacgcctgaagtaaaagaggtccttatccgccatttggaagaagcactcgatatgcacgaacaactctcaagctatatgatggaaaaaggctggtaccatccttggaaccctgacgaacaagtcaagctgaatttaaaaaatattgatacagccattcaattgccaaccctttaacatacaatgactgatttgctgaggaacagtattgattggccacaactgttcctcagcttcaaaatgagcactgtttgttcgggtcctatgaccgtaaatagattaaccgcttttctccatctgatctccgataatgtttgcaaattctccaatccaaataaggaatcgtaaccacctctttttatgcgatctcttgatggagaaaacaggccagaaacaaaatccttcgtttttgacctgccctcttcacacgcaaagaatgctaccttctttgctccactgatccgtgaagactttccgttttaggcctgcttttgagctttgcctcattttcacgcaatttcccatcataatctttaatttttgtgtctaatctcttaattgtttcatcaatttctttccgcttctctatcagccgctgtcgttcgtcagccaggatattttttcgagcttctaccgtacagtcaccttcggtaaataatgttgtatattcaattagcgcttctatcgatagtcccgcatttcgcatgcatttaatgaattcaatccatttgatatcttcttcatcatagtcgcgaatgccgctgtcttttcgttttacaggcgggattaatcctacacgttcgtaatatctgagtgttgcggctgtcaggccaaactgctttgccacctgagcaatattcatgatcttcacctctctatcctgcatgttgtgaaggtaacacttaaagttaactttaagtcaagctcaagacaagtggttagctgctgaatctgggtttatatattcgggacttgccttaaagcacactttaagctctatacttctccatgcaataaaaacagtgtagatggagggattgctgaatggcaaataaacaaactgccggaagagaacaaaccaaagtttgcttaacttcatgatgatgttctattcggtgacatttgggaaagagaggaagaacttccccccgagatcgcagcataattacagtttctacgttaattgctgactgtatctcaacttataaatcaggttcattttaaatgttattttaaaaaaacccttgccttaaagcagactttaaggtttatcgttatgttgaagacaccataaaacataaataagtgcatgtttttttacaacacttatgatgaagaaagggaaggttcatatgtgtaatcaacatcaaacccgtgtattaagcgtgtcacatgcaaaagccaaatttgaacaaacgacgattgagcgaagaggattacggccgcacgatgtcttaatcgatattaaattcagcggtatttgccattcagacattcatagtgcttttgatgaatggggcggtggcatcttcccaatggtgcctggacatgaaatagccggtgtcgtaacagccgttggagcagaagtcaccaagtttgctgtcggagaccgcgttggtgtcggctgttttgttgactcttgcggagaatgcgaatactgtctcaacggagaggaacaattctgcacgaagggtgttgttcaaacgtataactcagtagactacgacggaaaccccacttatggcgggtacagccaaaaaatcgttgtcactgacagatttgttgttcgcataccagatcgtttggaaatggatgttgccagtccgctgttgtgtgcaggtatcaccacgtattccccgctgaaacactggaatgttggccctggtaaaaaagttgcgattgtaggcgtgggtggccttggacatttggcgattcaatttgcacatgcgatgggtgcagaagtaaccgttctgagccgttccatgaataagaaagaggaagctctggaactcggtgcaaatcattactttgcaacaagtgacccagctacattcactgcattggccgggcgttttgacgtgatcttaaatacggtatcggcaaatctcgatgtagatgcctatttatcaatgcttcgtatagacgggacacttgtaaacgttggagctcctgccaagccggacacatacagtgtgttttccctaatcatggggcgccgcagcattgcaggttctctagtcggcggaattcaagaaactcaagagatgctggatttcgcagctgagcatggcatcgaacctaaaatcgaagtcatcggagctgaccaagtggacgaagcatacgaacgtatcctccgaagcgatgtccgttatcgatttgtgattgatatttccacattgtaataggttattccttatatggggctgacccgcttttattgaaactcacgaaaaacgatctcgttaagcaaatattttgaaggccggtcaatcttcctgttattctatgaatagagagttattaggagggttttttatgagcaaaaaaatcgcagttcttgttacagaccaattcgaagacatcgaatatacaagtccagtaaaagcatacgaagaagctggctacagtgttgtggctatcgatttggaagccggcaaagaagttaccggtaagcatggcgagaaagtaaagattgacaaagccatctctgatgtggatgcaagtgactttgatgcacttttaattcctggaggattctctccggatttgcttcgtgcagatgaccgtccgggtgaattcgcaaaagcatttatcgaaaacaaaaaacctgttttcgcaatttgccacggcccgcaagtactgattgatacggatcttctaaaaggcaaagatatcacaggctaccgcagcatccgcaaagatttaatcaatgccggtgcaaactacaaagatgcagaagtagtcgtcagccacaacattgtcacaagcagaacacctgatgatttggaagcatttaaccgcgaatctttaaacttgttaaaataacgagaaggcacagactgttcgggtctgtgccttttttaaaattaagactccttctttacattctgaaagacagcagtcgcgtcccacacattcaagccaaattgaccttctgaaaatgcggaatcatttgcatcaatcacaaggcgatcatctaaatagattttaaagcgatcgccctcggcctctgttttcagatgatacttttgattaacgtctatcggtgttttgtattcagcaatgacagaagcaacaccgttctcaaatttaaagaatttcactagatcatgctttgcatccacattggcaaggtaaccgtttttggcatctttgtcagagcgaaacattagtgctcctgcccctcttccgtttccatccttaatggtgatatcagattcataagtgaagtctgacccggatgctgaagacaagataaaggaatctccgtccgacctcccttgtttcccctcaattgtgtcggcccatgtgccatttacagtcgtccagccagtcatattggacataaaaggtgacgttccccataccttttttaaagggtgtatggttaaagattttacctttacgccgccatttgcagcatataattcaagccctttgcttgatcggtctgggagaataatatccgttatgacctgctttccgtcattcccaaatacttcaaccgaggagcggtcaacaaaaatgcgcatcttaaccttcccatttaccggcttcaatggggctgtttcttttccggtgttaaaggccggattaaaggtattgttgcccgactcgctccggtcaacgaacaatttggcgttccttcggtcatagccgaccttcgtaaattgattttcacctgttcggaccttaaaaccaaattcagcagctgaaccagggcttactttaaattctgcatttatttcataggcatctccagattgccccgctaacacattatgacttgcaggcgatatggtcagattcttccacttcttagaggttccgcgaatggtttccagctctttcaccggtgtttggaccactctaaccccttcggtaaacgctttcaattttaactctcttggaatggacgttgcacttctccatggggatgtcggaacatcattcgcatattgccaattgctcatccaccctaaccatagccggcggctgtctgtggatggaatatcagaccaggatacagccgcataaaagtctctgccgtaatccgtccagagaactttgtttggcgggttttcatttttaaaatgagttccatcaaagtcccctacaaaatattgcatgcctgatcctcccgagaccgctccgtttccgacactgacctgcatgacccatttcttttgattcggattgccgtctaccggaagctcaaataaatccgggcattcccatactcccccgtggcttccttgatcctgtccaaattcacttgcatacgtccactgcttcagattttttgatgtataaatgaggattcggtcaccggccgcaagcaccatcacccactttttttctttctcataccaaaagacttttggatcgcgaaaatcttttttacccgggtttggaatgacagggttgccagcatacttcgtccatgttcttcctttgtcgttgctataggcaatactttgcacttgatggccttcccgatcctgtgtataaatggccacaagcggcttctctttgcctgtttgaaaaccgcttgtgttatttttatctacaactgcgcttccagaaaagatcgtgcctttttcatccggatacagcgcaacaggaaggtgttcccatgtaaccaaatctttgctgacggcatgcccccaatgcatgggcccccactgaagcccgtatggatggtattgatagaacaagtgatattccccagcataatataccattccgtttgggtcattcatccagtttgcctccggtgtgaagtggtattgaggacggtaatcctcatcatagtagcttgaatcggctgcatctgccgaaaatgccatagtcaacagcagggtgaacatgatcatgacttgaataagtctctttttcatttgttccttcgctcctctcttcatgtttgaacactttcaagagagactgctgcgcaagctggtccgtttctggcaattctcctctgtttcactgttatccgaatgatttatatatgaaaagactgctgcagtttctctctctttccttcacacaccttatgctaagaatccagcccaatacccgagaatcccgatgacaaagatgccgcaaataatgagaagtggattcacccctttgcgaagcatccatgccaccaataacgttaatccgagaggcagcgcccccggcataatgctatctagcacgttttgtaccgtttgaacatctacttttccgctttcatccttaatcctggatacaacgattggaatgttgatggtggtccatttggacacgagagcccccataacaaataacccgagaatcgaagcgccctctgtaagcttttgaatgcgattccccgctaaatcctgaagaatctccattcctttcacatagccatactttaatccgtaatattttgtgcttaatcttatggcattcagcaagaaaaagaatagcaaagggccggcaatgtttcctcctaaagcaagggaggctcctagcgcagctaagacaggacgaatcgttccccaaaaaattggatcgcctacgcccgctattggtcccatcaaaccgattttcattccgcttatcgcttttccgtcaattcctttattgttcgccatttcttcttccatggctgccgtcacgccaaatataggcgctgtcagccacggatgtgtattaaaccattccaaatgccgctgtaaggcttcgtttcttttcgctccgggaccgtacaattttttgatcgccggtatcatgacataacaatatcccattgcctgcacacgttcgaagttaaaggaaccgagtaaaaaatttgaacgaataaacatgctgaaaatttctttcttcgttaatcgtttttctttctccattttttcttccccctcatcgtttaggcatcaagatcatcatcatcgtcatcataaacagcaacactgccactgtctgatgcggccgcgactgctccgtgagcgctttgtttttgcatcacctgctggtataaaagcgccagacagagaccaagggctccaaatcccactaagttaaaatcggtaaacgccgctaataagaaaccaatatagaaaaatggctttaaataaggaatattcatcatattgatcaccatggcatacccgactaccacaataatgcctccgcctatttgcagtccttttgtaatgacatcaggaatatttcccaggaacgcctgaacagcgctgacactaattaaagcaacaatcaatgtaggaatcatgacgcgcaaagcttgaaacaccatcgcggtaatatgcataatttcaattccttttatatttcccgcttttgcatattgatcagcgcggtggatgaaaaagacagtgatcgtccgaacaaaaatcgtcagcgcctgacccgcagctgctaaagcaacagcgacagcaatcccctcgccaattccttgatcagcggtaataactaaaatggttgagatgacagaggcgatcgctgtatcaggtgccatggcaagcccgacgttcatccagccgagcgccatcagctccagtgtgcctccaagaataattcccgtttttaagtccccgagcaccaagccaaccaacgtacaggccacaagcggccggtgtgtctgcccttcatccaatacacttgcgattccggtgattgctgcaatgattaacaacaaaataatttgtaatgaagacatattctcatccccttgattattttgctacgttccgtaaaatctgtacaaaatcctcactggcatctgaaggcagctgcctcaattccagtttcacgcccttgtcacttaatgtttcaaatgcctttatatcttgttctgtgacactgactgattttgtgatttgcctgcgatgattttcaaaacgcattcccccgacgtttacggttttgatcggtacacctgcttctataagagatacaatatcggacggattttcaaacaagagcattgccgttaccccttcgtagcgcggactatgaaatgcttttgccattttagaaaccgagacggcactcgcctttacatttgaaggcgcaacagaaaggatcagcgtttttctcatttcgtcctgagcaatatcgtcggagacaacgatgattcggtcggctgcatggacttttatccaccttgtcaggatttggccgtgaataaagcggtcatcaattcttgctaacacaatgttcatcataattcatcctctcttgtatcttgattggctgtttttactttttctaaatgttcactgcacacttgaaagctttgctgactcattgcttttaagttgttcagcaaatctttgagagccagatgttctctcaggcttaatacctccagcagaatcggcaggtttacgccggctgccatatccattctttgatcctcagcaataaaggaagctgccgcgttatatggcgtccctccaaaaatatcgactaaaaaaagcacttcatgttcttccgggatatccttgagcgcctgatgatatttttcttgcagcgtttgtattccttcccctttaaaaaacggcactgcaatcaggttattttcttcaccgaatatcatccctgaagattcttttaatgctatgggaaaatctccatgaccgctgataataactgaaatcatatctattgctcctttcctgttttgtacatccatatataatgcaaggatcgtgccaacacagttgtgttaagcgttttcattgttatttcagccaatagcaatttgttgtcgaaacacttaaaacgaaaaaaataaacctgtattaaaatggtgttccatttaatacaggttcatataaaaaaactgtttttaaaacagctggccatgcacttcttcagcaaatatggcggctataaataatttttcatcatcacttatgcgaagtccgagcttttcttcataaggggctaatgttcgttctgtcacgtacaccatttccttcagctgatcattgatctcttcttcctccgagaaagcgatcggattctgcttaattaccctttcaaaggcgaaagccgtgtgcataatgactttaatcaaaaccgcattattgaaaatgacccccagctcatcttgaacggtttgcagccactccaataacatttcgatcacatggtggggattcaagaagacaaggtattttttcaggctatcctcgcaaagctccctgacaataatatttgcttcgttcaatccattgctcaaggggatgcttccttttgtaatcgcctgttgaatcagcttctctccctccccttcaattaacacttctaaagatacatgcggagcattgattttagggtctttcgttccgactgtcgcaaggatttcatactctttttcgatttcttttatgctgttggccagtttaatcgatgatacggtcaatatgtgaatcggggtatcggaggccttgtttacgatcgtggttagaatgtcttccagctttttggccgttccgctgcccgtcgtgcagatggataccaatgccttctttttgccggatgccgctggctgacgctcccacagctcgataaaatccttcgtgaccgattgatagatcgcatgcaaatttaaattcaaatagttgacctttctgacagcatccagcaccattgaagtcgtaacattgctgatcgttttgatggaaatacctgtcttttcctccagcctgctttccagcattgcaagcgaccccatgtctaccagcattaaaacaccttcaccttcatcaacctgtttcattttttctgctacgcattcaagaatgtccgaaggtgaaacagaaagtggcatatcgactgctgcaatcggcgtgctccctagcagttctgtcgcaacttcaaccatcgaactcgccgtgctgtttccatgagcagccacgatgataccgactcttttgttctcctttaacgatttgatggaatggattaacatcgttaagtagatgacttctatttcaggaatagccactttaaaatattcctgaattttatctttaaaaatcatcgccacccgatattctttcacatgagtatcacgaatttcatcagtctcctgtgtattcaaaacatcaatttgctttcctcgctttaaaaatgcgtcaatatgcatactcaagaaataaataaacttgcggtcaaatgtacaatccagctcatgttcagctatttcttttaactgttttgtcatttgaatcacgtcatcttcaacgaatgtcagcaggttgtctttttgaaaagcttgatgatgaaaaaaacttctgacatgcaaatggacatcagtcaagatgtattggttaatatcctttttggataaaccttctttcataagcgttttcactttttcctcaatcaaatgatataagttaaatgaaaggtcttcgtcaatttttgttgtttcatcttctacaatcggagagataatagttgtaatattgacatattcagaaatggctttgcttctttgcatgtttttgctgctggacatccattcttgcttgatttcatcaggcagatcgcgaacagtcagttcaataacctcatttctgtcaaggttatgcaaaaatccgtgtgcgcaaactaactggacatttgatttcagctgtccgacattcccaaatttcgcagagtgaataagcgcattatagacatcgatatgcacactcagattcttcttaatccgctctgcttctttccctaataaaaacgtcgtcagatcgactctttctttaagcgatcgttcttcaagcgaaggaatatgaatggtcattgggattcttcgcaaaaacgttttcaatagtgcagaactcggattttctgtagtcgcacaaataaacaatacgttcgatgttcgtttatgttcagattctccaagcctgttataagaaccgctgtcaataaaataaaacagcatttcttgtccctcgggagggagacggtggatttcatccataaaaagaatgcccccattggcctgttcgactaaacctgccttatcctcggcagcacctgtaaatgaaccttttttgtgtccgaataattgagaaagcaataattgagggttgttgtagtagtctgcacagttaaatgtaataaatggtgcgccggccttcaatatgtcagagtaaatggcaaactggtaaattcggttcgcaaaaagggatttaccggaaccagtcggccctaggaggagcatatgcagaccgttcggcggataaaagacagctgcttttgcctgggagatcgctttcttcaaactcccttttgcccctatcataagctctaggggattcgtggaaatgtgttgatgattttgctttgaatttccggaaaacgcctgaaggtctttcacttccatcatctctgtatcccatttcttgttgaataatttttctgctatctcgactgggatgtatcttacaggaaacgttttaattttgatgacctttttggaccggacgagattgttcaattcaaagctgacattggaccgctccattttcagctgctcggcaatctcctttgctgaattcccttgtatttttaaaagatgatctaaggttgaatcatgaaaattatgcttgagctgatggtatattttatctattcttctcacgtctatcatcctttgtccttattagataagccattaacaagaatatttcgaaaatttatagtccgcgttgagattatctgctgatacacgtttaaaaaggtctctatagcagattgacaaaactggcttttatgcgtatatgtttacatgttgaatcatttgcatctcatattagtatgatagatgctcagttctcgagggccagtccccttcaaaagtaataatcagtaaacagtttatcattctcggggaatgtaatgatgtcaaaatcatcaatgacaaaaaatgaatcttatagatcatgacaaattacccaaatataaccccttaagttcgctcacaactaaaaagacgggcactctatgtgaccgccacagtattacaatttgcaaaacttcgtcatttttgcaaagttaaggaatctgtaagcttaaaaactttatctccgatatctctcgatttgatcccccctgtaggcctcaaacatagtgggtatgcaattatacaaatcgttaccgattaaaactagcctgtcagattgtccaaatgactttcctgttttactctgctattcaggtagaatcaggagtgaaaatagagccacaagacatgtaacagcacttaaaatagttttaaaatttaaaaataaaagtatctattcttttaaatgttataatatccgataaaactttacacatctttttattactggaggaaaataaaattgataggcaattctagcaaagacaattttggccagcaacagaaattgtctagaggccttaaaaacaggcatatacaattaatggcgattggaggtgcaatcggtacaggtttatttttaggttcaggtaaatccatccattttgcaggaccatccattttatttgcttacttgatcaccggcgtattttgctttttcattatgcgttcgctcggagaactgctcttatcaaatgcgggataccactcttttgttgattttgtaagggactatttaggaaacatggcagcatttatcactgggtggacctactggttctgttggatttccctcgcgatggctgatttaacggcggtcggcatttatacgcaatattggcttcccgatgtgcctcaatggctgccgggtcttcttgcgcttattatcctgctgatcatgaaccttgccaccgttaaacttttcggagaattagaattttggtttgcattgatcaaagtcattgccatactggctctgatcgtaactggcattttcctgattgcgaaaggtttttcggcagcttccggccctgccagcctcaccaacctttggagccacggcggcatgttcccaaatggatggcatgggtttatcctatcgttccaaatggtcgtcttcgctttcgtgggtattgaacttgttggactgacagcaggtgaaacagaaaatccccaaaaagtgatccctaaagccatcaatcaaatccctgtccggattttacttttttatgttggcgcacttttcgtgattatgtgtatctatccttggaatgtgttgaatccaaacgaaagcccatttgttcaggtcttctctgcagtaggcatcgttgtggctgccagtttgatcaattttgttgtattaacatcagccgcctcagctgcaaatagcgctttattcagcacaagccgaatggtctattcacttgcaaaggatcatcacgcacctggactattaaagaaattaacttcttctaacgtgccaagcaatgcgctgttcttttcatccgtcgccattctgattggcgttagtctgaattatttaatgcccgaacaagtctttacactgattacaagtgtttctacaatatgcttcatttttatttggggcatcacggtgatttgccatttgaaatatcgaaaaacaaggcagcatgaagcgaaagcaaacaaattcaaaatgcctttttacccattatccaactatttaacacttgcatttctcgcgttcattcttgtcatattggcactggcgaatgatacacgtattgctttgtttgtcaccccggtctggtttgttttattgattattttgtataaggtgcaaacccgcagaggacataagatgaaataaaaaaaagacaagggatactcactcccttgtctttttatatgtgtcaaacactaaattaaactttggtttcaaatctcattcacttcatttaagtgttaactcaaaccagttttgatgccgaaacctactaatattattccggtaattttttgaaacactttctggaacttcgagtttttcatccatttttttgcgtaatcaataatataaacaagaaacagaaaccacaacaccgctaataaggttagaattgaagctaaaatgataagctgctggtttatatttccgttcaaattgataaattggggcatgattgtaacatacactaaaacagttttaggatttagaatgttactgagtgatccttgcataaaggaagttttataataacgtttcggagaacttgccatattttttgcttgggattgcatgtcatctaacgaaaacatacttttagcaaaaaagctttttacacctaaataaattaagtatgccgctcccaaatatttgatcgttgtgaaaagaatcactgactttgcgattaccactgataatcctaaaatggcaatcaccgtccaaaaggaaagtcctgtcgccaatccgagaatgttataacggccggctttcggaccatacctaagcgtatttttcatcacaagcatcgtatctgcccccggcatgataaccatcatggcagcgatcggtatgtatgcgagtaagctgtgcattgttctctccccctttaaaaatcccctcaatcatatagtgactacaaaagtaactacttataaaagtgtatcaatgcatttggaataaatcaatatggtttgttaaaatagcgattactaaggcagcgattgctctttatattggaggatatatgaaagaaaatatgttagacattttaaaaaacctcaattttacagaatatgaatcgaaagcgtatttggcattattgcaagaatcacctttaacaggctatgccgttgccaaaaaatccggagtgccccgttctaaaatttatgaagtcttggaaagccttgtcataaggggagatgtttttgtcagtcatggaaatacacctcagtatgttccagtccccgcaaaagaactgattaaaaaccgccggctcaaagcggaagagcattttgatcaggctgagaaatattttgaaaagttcgagcagactgctaatgaccgggaaaacatctggaatatcaccggccgcagtgaaattcttgaaaaggtgaaggcttgtattttatctgccaaaaaaagaatcctcttagaaatatggaaagaggattttgaggagatagaatcagagctaaaacaggcggcagaacaaggcgttattgtcaccattattgcgtacggagacatcgtatctgatttttccaatgtttaccttcatgatatgagcagtgaaattacagaagagtatgacggacggtggcttgtctatagcggagatgattcagaagtagtagcgggcattgtctcacttggcaatgacagccgtgctgcatggacgatgcatgtaggtttagtcatgcctattactgaagtgatcattcatgatctgtacctcatggaaattctgaaaaagcatagagagctattagaagagagcttcgggaaaaatctcatccagttgcgccgtaaattttctattcactcagatttcaaaaaacattatttggaataatgtttggcatctcttaccccaaaaacaaggcttgtacaaaacaagccttgtttttttatgcataaaccccccatccccatgctgatttacttctctcttttaaaaaatgtgattctgcgcaaactatttttcagcctgccgcgtctatcctaggtaacagcctacgatatacgtatattcaaaaaggagccctttattgcaatgaagaaaaaacaaacaacaaaagcgttgcttgtcacatgcataactgatcataagcaagatttctaccggttggctttcagttatgtgaaaaatcaagatgacgcattagatattgttcaagaatcgataaaaaaagcgctgagctcagttgaaacggtcaaaaaccctgagacgataaaaagctggttttataaaattttagtacggacagccattgactttttgcgcaaacaaaaaaagataagagtgatggacgacgaaacgatagaatttttaagcaaaggaaaggaagaccattacaaggatactgatctccatgaagcgcttgacgaattgccgtaccgctataaaaccattattattttacgtttttttgaagacctcaaattagaagaaattgcggaaattacaggagaaaacacgaataccgtcaaaacgcgcctatacagagcattgaagctgatgcgcattcagttgacgaaggaggatctttcttaatggataagagattacagcaattaagagaagaatataaaaatgttcagattcctaaagaattggatatcattgttgaaaaagcccttcagcaagaaccaaaaaagaaaagaatcgtcatgtggccgacatcagcagcaatcgctgcagctattttattcactgcacttgttaatatcaacccggacgccgctcaggctatgtccaagatccctgtcatcggcaaaatcgtcaaagcgatcacctttattgaaatcaaagaggaaaaagaccaatcaagcattgatgtcaaaacacctgctttgtccgggctttctaataaagagcttgaaaacagcattaaccagaaatacttgaaagaaagccagcagctgtataaagagtttatacagtccacatccaaaaacaaaaaagggcatctcagcatctacagtgattacgagacggtcacagacacgccagatttactctctatccggcgcaatattgaaacaacacaagcatcttcctacacacaaagccgttatattacaattgacaaaaagaatgatattttacttacattaaaaagcttattcaaagatgagcgctatatcaaagtcatcagtcaaaacatcaaagaacaaatgaaacagcaaatgaaggaagatccaaataaaatatattggctcactgacgaagatgcagaaccgttcaaaacgattcttcctgatcagacgttttacattactgaagaccataaacttgtgatctcatttgacgaatatgaagtcgcccccggctatatgggcgttacagagtttacaattccaacccgtgtcatttcaaacttgctcgtgggagaacgttatattcgataaaataaaaacatccatctaagattatggatgttttctctcttctctattcgaggtcgtaacctcgctaccaaaaacaacgagaatatttgcatactattggaggaatacccatgtatcacaagacacagcatcatcgatacattcctggacttgatggccttcgggctttcgccgtcctgtcagttatcacttatcacctaaatttcaattgggctaacggtggttttatcggagttgatatcttttttgttttatcggatatttgattacatctattctattaccggcatatggaaatgatatcaatcttgattttcgggatttttgggtgcgccgcattcggcggcttatgccagcggcttaccttatgatcttttccactgttgtgtgggtcgtattgtttgatcgagaactattacacactgtacgtggagatgcgatctcttctctcttttatatgagcaattggtggtttatttttcacaagctatcatattttgatagtttcggttccccatcacctctaaaaaacctttggtctctggcgattgaagaacaattttatatcatatggccgatgttcttagttgttggaatgtacataatgaaaagccacgccagattggctgcggtgatatcattgcttgcgctttgttcagccgtgatgatgagcgtactgtatgaacctggcggagatccgagccgcgtttactatggcacagacactcgttcgtttgaacttctcatcggatgtgccttggctttggtatggccgatgaaaaggctgtcttccaacaggctgccaagcaaactgaagcacactttgcacgccactgaattttcggcattttgtattttagtgttatgtgtctatttctcagatgaatacgagccttttctttacagaggcggaatgctattcattagcgtgactgccgcaatccttattgcatgtgtttgccatccgagcagctttttaggcaatctgctttcatggaggccgcttcggtggcttggaacgaggtcttacggaatttatctttggcactaccctgttattgtgttaagcacgccagttcaagaaatcggaaaccctgttttttggcatatcgtgctaaaggtcattgtgacatgtatacttgccgagctttcctatcattttattgagaagccgatacggacacagggatttaggtcatttttccgccgtgtttttatacatagaatcatagaatggaaaacgacatctgtcatcagcaaactgtcaattggtttcgtcattttcgctatacttatttttgcaggagggctgtctgggttagccggagagcaaaagcaccctaccaaatggacctatagctcacaagaaacaaatgctgactccagccaggcttctggggataaaaagaacgctgcagcagataaaaaacactatcctgaacaaaagacaacagaatccgatcaacgtcaaaaggaaaacaaagatagtgggcaagagactcataaaaagaaagacacgcaatctcaacagacgaaaaaaccagcagacactgcgaaagaggtgttagctataggagattccgtcatgcttgatatttcttcacacctgcgtcagtcattttcaaatgtgacgattgatggaaaggtaggaagacaaatgtctcaagctttggaactcgcaagggagtacaagtcttttaatcagccgaacaaggctgtcatcattgagcttggaaccaatggctactttacaaacagccaaatcgaacaactgcttcaatctttctcaaaagcccatatctatcttgtcaatacacgggttccccgccaatgggaaagcaaggttaatgaatctttacagcaccaggcaagcgcacatcaaaatgttacgttagttgactggcatacagaagcccttcagcatccggaatattttacccctgatggtgttcacttggttcctaaaggggcaaaagctttgactgctcttattgttcaggcgatgaaatcgtaaaaaagagatcctatacggatcacttttttactttagtttctgatcgttgattatgtcttctttcagcaaggcagcccttatgtttacatgccgtttacgtaagggtaagccaaaattgaatggagggatgataatgaaaggaaatgaagaacatgacatccaaaaagagttgaaacgatatgagctttttttcaaaaaacgatataaggttctttatacattaaacgattttatcatcggtgctatgtttctcgttggaagttttttctttttctatgaccggttaatgtcggcagggatatggctgtttgcgatcggaagtttgctactgttaatcaggccgaccattcggctgattcatgactttcattaccgtaagcatgtggaacagcaattcaagcatcaatcttcaacagatgactgatcttaaggaataagaaagaacaaaatgccaaaagcctgagttgaaaatcaaaaacaagactttcagactatttatttttgaaaataaggtaaaaagaactaaacttttgcctctgcatgccgatatgaataataaggccggcgcgatactccctataacatccttttcagtagatttcattatcgtgccggttttctcatatgcaaagcaatcccgccaatcagattggcgggattttatattttacattcctgtccaaacgtcttttacataacgtttttgatcttgcagcttttgcagccattcagctgattcttcctgacttgctcctttttcagcttcatacgccaatcgcaaagttttctctacatcaggagccatttgcgatccatcaccgcatacgtaaatatgagcccctttttcaatgagtgtcatcaatttctgcgtatcttgcttgagcaagtgctggacatatccttttggttcgttttcgacgcgcgagtagcatcggcggattgtgaccaaaccgtcctgttccgcttgatccagctcttctctgtaaaggtcgtcatggtccgggcgacggcagccgaagtataaaagtgcttcaccaagggtgcttccttccttcttcaaaaccgatcttgcctgaataaagcccctgaatggcgcaattcctgtgcccggcccgaccataatcataggcgtttcaggctcatccggcatctggaatccggactgcggggtacgaatgaaacaggctgctgcatcatctgtattcaattctgctaaataattagaggcgacaccccggtattcacctcggccgctccatgctgaggctttcacaactcctaccgtcatgctcacgatatttgcatgaactttcggtgagcttgaaatggaatagtatctcggttttagtgatggcaaaagtgctaaaaaccgttcaaacggcatttcgcaagcaggataatcctctaaaaaatcaagcatggtaagacgtcttgcaagtacctgctctttgtaaatgccatcatctaaaacgagctgttccagctctttttgatgcggcggacagactgtataagaggccagctcccgaagctgaagccttgatgccggttcctgcagctctacataggacgacaataaatccgcaactttgatcggccgatccatcggcagatgagacatatgagcgcttccgcttacttttatcacatgattggactgcaaaccgaatcggctgagaacccgctgaacaagctccctgctgttcttcggcaggattccgatatgatcgccttctttatatgttttaccagccggaatttccaattcaatatggcgggttgaacgcgtgctgtcagctgtctggagttctcgattctctaacacaatcccttcaaaggcgccatatgctttagcaaccggcgtttccgtcgcttcactgagaaaagtaatcgataatgaaggcctgtcttctttctgggctatttcgttaatgtcaaatgcgtccattgtttccttccagaagcggttttcccaagactcgcggtggctttcaaaatcatcggcggcgtcaccttccccaatctctgttaaacgcgatgccccctttgctttcatcatgtcatcaatcaggcggggaatccgctgatacgtgctggcccagctccggtttccgcagccgaataccgcataggaaacacctttcaattggccttcctcaagctctttcagccactctacaaagccggcagcattatcaggcggcgccccattataagaagccgttacaatgacgactgcccctccttcagggagcttgccgatataatcatcaagcggagccgtttcagctgtaaagcccatctggcggccttgagcagccagttcaccggctattccctcagctgtcccaagatttgaaccaaaaagaacaagtaaaggtgtgccgtgtttaggtttggtttcttttggctttgtttctgctttgatgtctgcctgttcttttctctgtacattgattgccgctgttttccgcggtttcacagtaattttaaaatcatccggcttgatcgttaatgcttctttgatttttagttcgtagccagtatggtttatcaattcaaaatgctttaatacaagaccgagaaccattgtcgcttcttgaagagcaaactgcatgccaatacaagcgcgctgtccgtttccaaacggcttatacgcatggtgagggatacttgaaggatcctcaaaccgttccggacggaaatcttccgcatccggtccccaagcgttttgatcccggtgcagttttggaattaaaacagtgactggctgccctttgctgatcggatattccccgcctagaacagtatcctccttcgcatatagagaaaaagccggagctgttggatacagtctgagggtttcatttaaaaccatccgaatgtatttgagctgctggatttgtttatattcaggcgtgtcatccgttaacacgcgatccgcttcctcctgagcttttttcagtttttccggatgtgtaagcagacaataaatcgcaaaggaaagcaaaccgcttgtcgtctcatgtccagcaattaaaaatgtgatgatttgataccttatgttttcatcatccagcgtttcacccgttactggatctttggcataaagcatgagagacaagagatccttgatgttatcatccggattcgcctttcgctccgctatcattctatcgaccagggagttcatgacttctatatccttttgaaactgcagcttcgttttcaccatcatcttatcttgcaggcccagtctttttgattgattcatcgcctcttttaaggcacggagcatactggtgataaacggatgctgtgaatcacggtaaaagctgttgaatcgatagttaaatccgcataacccaatcgtatcaagcgtcagacgtgtcatatcgtctgctacatcaatttcttcattagggtttaaccggctccatttttgaatcagctgggttgcgatatccagcatcatagaatgatagcctttcatcgctttttgactaaaactcggcagcaaaatgcggtgggctttttgccagttcggttcgtgcgtccagcttgtaaataagccatctcccccgaattcgcgcaccttttgcaagcctttgccaaggttcttgtcaaagcggctttcatcacacacttcagccacaagattgtgacccgatacaaaaacactggatactcccggaaaatcaaaacggaaaatcggccccaattcatcagctatccgccataaggattgagaaagctgttctttttcaagatgcggaagattttttaaaggtccgtatgttttgggctgaggtattgcgcttgcctgtttcattaacatctccctttcctatttttgtgatgaatgaagcttaatggcgtcccagcagcattgttccaattcagtaattaaatcagtgtccatctctatatcacctgtttgaacgagctgatatatcttgagaaacgcccctaatacaatcgcaattaacacattagagggcaggctgcgaatcacgccttccgcttttcccttattaaaatagtcatcaagcatttgagtcagattttctatcatttttttgcttgtatgatttaagtaatgagcgtcttttttggtttcaagaaaaaaaagcgcatagtcgctctctttcgtaaactgaacgagacagcaaaatacgtggtgaaagccttctctgacaggcaattctgaaacgtcttgcttcagtttttccgtaaatcgctggatgctttcttgaaacagtacgttaacgagtgtttctttgctgtcaaaataacgatagatcgttcctgtccctacatgagcacgttcagctatcataggaatagtggtagcgtcaaaacccctttccgtaaaaagtgagactgacgctttcataatcatgtcgtatttactgctggatgcggatatcatgtaatctgacaacctccgattcgtttacggaatgaatattcattccttttgttcacaaagaatgtctgccctgtctgatatcacctctttgttctttcttctgttataagtttatatgaaaaaaactttttttaatataaagtatatgcaaaaaataaaaaattaagaaaatatacccaaatcctaatacaaggatcttggatatatttcccgagaaattttttatttaacagccacaatacatagacaggaagcacgcctgataacagaaagatccctgaaatgctggtctttcagcagttgaatatacgttttctctttttcaccggtatttgtgtcaatactgatataaaaccggccgtcaatttgaagcaccctgtaaatttctcttaatgcaagcctaatatcggtgcagctttgaaccgtatgtaaagaaaagactttattaaaggtacggtcatcaaagggaatgtcctctggatagccatgaaaaacctccccgttccccatgttctttcgattcgcacgtgatatctgtcttacctttcgctttgaaggatcaatgctttttaggcttcccttttctagtttcttggttatgcttttaaagacagtgccatttccaattccaatttctaaaattctgtcatttccttgtatatctatagagtcaatcatcatatgctcaattgttttggttagcttatatttccgagaaaataatttccaaaaattcgatcgtttatagagtctattttctagcattttaaacacctgcttttggtttcctatgtttatttattatattcaaaaaataaacatcatcttcattctaaaagtgaaggaaggtaccaactagacggcaatgtattgaaaaatgtttcaatagaactaaactttttcatttttttccgcaaaaaaagcagaaaacaaaatgttttctgccctctttctaatgccaatgataagggaatacatacagcctttgctgctgcattgccatcagcctctgctgtcggaatggatttccataaccatgtttgaaggaatgcggcatggacgcataaccatggccaatcgacggcagccttttttgataatcgttcatcatgccatcacctgcctcacagtaacgttgatttattgtatgcaggcaggcattttcttgacagtcatatcgctaaacttggtccttctccattgtataatgcatcaataattccattctaagcatatgccattcccccttcagtttttttcgttgcttttagcgccagtttgttaaataaagatgctttaactgagactctttcatttcatcataaatctgctcaatctgctgttctcgttcgaattcttccaggcttttaaaccgtttttttatcgttaacgttaaaaagaataggttaatcgtcatatcgctcaccccctttcaaagtccgcatcaagcgaaataacccgcggcacaccccttctgccgcgggcaaataaaaaccgcagacaaaagaagacaccaatgcctctactgcctgcggggagttgcgtatgtccgactattccgaatttaatgcgtgcgataagcatcggttaaggaaggacacgaactcttccacaggctgaataaaccatgaacttttacatgtgtatcacgtacaggttgacgtcgttgtctcattgtcattttggttcagcctcctttgctttttttcttactttgtaagtatatccaccaaattccattttgtaaacatctttttctaaaaatggacggaaattgtgcaaatcatcgaatggatttgcccgttggtcatgacacctgcttcatttcttttctggagcggtctttcttatgatatgcaataaaataaatgagaccgacaaatacagctccgccgatgacattaccgataaaagccggaatgatgtttccgatgaactgcccccacgtgaatgagcctgcaaaaatggcagcaggaatcacaaacatgttggcgacaacgtgctgaaatccgatagccacaaaagccatgattgggaaccagatgccaaggatttttcctgctgcgtcttgggcgccgaaagaaagccacactgcaagacatacaagccagttacagccgatggcggaaatgagaaccttgccaaagctcatatcaagctttccttgggcaacggcaatcgttttttctaaataaggacctgtttcagtcaatccaaccaaatgcccgaaaaagtacgcaacaaacaatgcgccgattaagttcataattgtgacgattccccagttaatcgctaactcttttactgatatttttctcgaaaataacgccattgcaactgacatcatattgcctgtgatcagttcagcgccagcgagtacgacaaggatcaggccgactggaaatactgctgcaccaatcaaactggacaggctcccccattctttcggaagatcgccgattaccctgatatcaagcaaatacccaagcgcgataaatgcaccgcctaaaaaccccagcacgagcagtgacggcagcgggagctttatttttttcatccctgcttcaattgctgcttccgctatttcatccggttttcgaaaagccataataaaacgcctccattacttcttcttttctcacagttatgcaagaaaggcaataaaaaaggcagcactcaaataacctgtgtcaaaccaggcgtttgaatgctgcctaacttgtatgcatacccatacaacaatatcaagcagtatgaagatattgaaagagaatatatacagttcgtgcatacattccattgctttagccttctataactgtagcaacatcatatcaaatgtgacaaatttgtgtcaatgacaaatatactagctttgcagaacttctttttgctcatctatttttcggtcaaaaacaaatacagatacagcgatgttttcctcaattttaatatcagaaaacaaatggactagcttagctcccatgagttcctccattccttccggtgtttgtttggaataaaggtcttgaattaggcttgtccgggccgcatgtaccatctctcttccttcaggcgtgcgggcgataaactgctcgcttgcactcagatttccatatagtgttgaaactgccatgttttctacaaatacagtatgaattctctcaggcccttttccgaacaattctttgcgaagttttcgaataatatcattgaattcatgaatttttttagacatgctgattaccccttccgatattgccttataaaggcttttcccggttcccctcaggacatttcacttggttaaaattttcctgccatattgtattataataaatatcacattataataaaagcagtgttgatggatttgtaataggatcttgttatgagtctatcgttttataaaaatcaaggattggtctgttagtaagacttgctagtgaactattccgccatgtgtgtttacaccttcttagaattaagggcaggtgtatctctatacatggctttttttgacttcttgaaagaaagatggaggggaatatgaatatgatggacgttaagtcgatcagtgtccgtgtagacggaacagaaattcaagcacgagcaggggccacaattttagatattttaaatgaaaacggaattgagtacccgcagatttgccacgtaccagaggttgacccgattcaaacttgtgatacttgcatagtagaggcaaacggcaagctggttcgttcatgcgcgaccgttgcagaaaacgggatgtctattgatctttcaggaaatcgagtgaaagaagcgcaaaccgaagcgatggaccgccttcttgaaaatcatttgctgtattgtacagtttgcgataacaacaatggaaactgtacgctgcataatacagcggaaatgatggggatcgagcatcaaaaatacccatacacgccaaaagaagatccttcttgcgcggttgatatgtctcatcctttttaccgctatgatccaaaccaatgtattgcctgcggccagtgtgttgaggtctgtcaaaaccttcaggtaaatgaaacactctcaatcgactgggagcgcgaacgccctcgcgtcatttgggatgagggagttccgatcaatgaatcttcctgtgtcagctgcggtcagtgtgtcacagtatgtccatgtaatgcactgatggaaaaatcaatgctcgggcaggctggttttatgacaggcattaaagaggacgtcatggaaccgatgattgatctcgtgaaaaatgttgaaccggggtatggcagcatttttgccatttctgaagtcgaagcggcaatgcgtgaaacgagaacgaaaaaaacgaaaactgtatgtacgttctgcggtgtcggatgttcatttgaagtatggacaaaaggacgggatattttaaagatccagcctgtttctgatgctccggttaacgcgatttccacatgtgtcaaagggaaattcggctgggattttgtcaattctgaggagcggatcacaaagcctttaatccgtaaaaacggagcctttgtggagtcttcttgggcagaagccctcgatcttgtcgcaagcagattaggatcaattaaagagcagtacggtaaaggctctgtcgggtttatttcttcttctaaaattacgaatgaagaaaactacgtcattcaaaaactagcgcgtcaggtatttgaaacaaacaacgtcgataactgctcacgctactgccagtctcctgctacagacggattgttccgcactgtcggcatgggcggtgacgccggcacgattaaagatattgccaaagcaggcctcgtcatcattgtcggtgccaatccggcggaaggacacccagtgctcgcaacacgcgtcaaacgggcacacaagctccacggtcaaaaactgattgttgctgacctgcgtaaaaatgagatggctgagcgatctgatctgttcatcagccctaaacaaggcacagaccaagtttggctgatggctgttacgaaatatatgatcgaccaaggctggcacgatcaggcgtttattgatgagaacgtcaattactttgaagattataaagaaacccttaaaacgtatacgcttgattatgcagaacgcatcacaggcctttcaaaagaaaacatcattcaaattgctgaaatgattcgtgatgctgacggcacttgtgtcctttggggaatgggtgtcacacaaaatacaggcggttctgatacatcagcagccatttcaaacctgcttctcgctacgggcaactatcgccgtccaggtgccggcgcttatcctctgcgcggacacaataacgtgcaaggcgcatgtgatatgggaacattgcctggctggctgccgggatatcagcatattacagatgacaaggcccgcgctaaatttgaagaggcatatggtgtcgagattgatggaaagcctggtttagataatattcaaatgcttcatgccattgaagaaggaaaaatgaaagctatgtatcttgtcggtgaggatatggcactggtcgattcaaacgcgaaccatgtgcatgatattttatcaagccttgatttcttcgtggtacaggacatctttctgtcaagaacagctcaatatgctgatgtcgtcttgccggccactccttcacttgaaaaagacggaacatttaccaacacagaacgccgtgtgcagcgattgtatcaggcgcttccgacgcttggtgacgcaaaaccggactggtggattattcaagaggtggcaaaccgtttaggagcgaattggaattacagccatccaagtgacattttctctgaaatggcgagtctttctcctctgtttgccaaagcaagctatgaggtgcttgaaggctggaacagcttcctatggggcagcttcacaggtgaaagcacaccgcttctgtatgaagacggatttaatttccctgacaaaaaagcccgctttgccctttctgattggaccgagccagcggcatttccggaggaatatgaccttcatatcaataacggccggatgctggagcatttccacgaaggaaacatgacaaataaatcgaaaggcatccaagcgaaagtgccgaatgtattcgttgagatctcacctgagcttgcacaagagcgaggtgtttgtgacggttcgcttgtacggctcgtttctccgttcggagcagtcaaattgaacgcgctgatcacagaccgggtacggaaaaatgaactctatctgccaatgaactcgacagacaaggagtcagcgattaacttcttgacgggccctgcagctgataaacggacgaacacgcctgcttataaacagacaaaggtccgcatggaagtgcttggcggctgtgaaacagcgccgcttccaaaaacaaatccgcgcaacaaaaaacggcatccgcaaaacggagtcgaagcagaaagaaaatggaaccgccctggctatgtacatctgactgattaaacgataggaggaaaacgaatggccactccgattacgacgatcaaaaaagaaacaaaaacagctgagcaaatgaagcttgaaaaaatagaagaactgaaagagctgctggcggaaaatgaggacgccgtctctaaaacgatgacgttaatgaatgaactcaatgatcttggaatttttgatgcggcaacaagcatgctcagagcgaaggaagacattgccaagattgcgcttggccaagtttcccgcgagcctgtcaccaacctcatcaacacgatgatggccgccggaggcgcattgacaaaagccgatcctgagtttacagcaaagcttttagaaagcgtaatggctgggactgaacaggcacaaagctttttaaaagaagacaagaaagtcgggattctcgacctgttaaaagcaatgaacgatcctgatatcaacagagccgtcggcttcggccttcagtttttaaaaggcatgggaaaagaacttcgagaacaataacagaaaaacagccatcgctgatgatggctgtttttttattcgtcggcttcttccaaacgcttcttgtaaataagtgaacggtcagcgcaaaagaaggcaccggctaaaaatacgcaatccgctaaaaacatcgtcgatttctggcctaatgttaaaccttgatcagggagaactgcgcctatatataaaaaagtgctgactgcaagcaatgtaaaagcaaaatgcttgtagtcttcttttaaagatttcattctatttttgttcaaaagaatcacctgccagattcatagtatacgactattataatataatccggcggcttacagagaaagtaattctatccatttgttatatattttcaagcgcttggccgatatcttccaacaagtcttccgcatcttcaattcctacagaaattctgatcaagccgtccgtaatgccgagctcaagccggcgttctctcggaatagaggcatgtgtcattcttgcaggaacagaaattaagctttcaaccgcccccaggctttcagcaatggtaaacagtttcagatttcctaaaaacgcatcaacccgttcttcactgccaatatcaaaggagatcatgccgccgaagcccgctccttgcgtttttgcaagctcatgtccgggatgatttgaagaaccagggtaatataacgtttggacagcagggtgattctcaagaaagcttgcgattttccgcgcattttgatcgatcgcttccattctgagtcccaacgttttgattcctctcattaacagccaggaatcttgagggccgagcacgccgcctgtggagttttgcacaaaatgcagctcttctccaagctctttcgaagctgtcacaactaaacctccgacgacatcactgtgtccgccaagatattttgtcgcactgtgcagtacgatatcagcgcctaaagtaagcggctgttgaaaataaggagtattaaaggtattgtctacgataagcagaacacccgctttttttgcgatatcagccatgagcgtcaggtcggtgattttgagcaacgggtttgtcggtgtttcaatataaattgcttttgtattagggcgaatcgctttttcaacttcttccctgctgctcgtatcaacaaatgttgattcaatgccaagacggttaagcacctttgtcatcacgcgatatgttccgccgtacacatcatcagtcaacacgacatgatctccgctgttaaacagcatcataaccgctgtaatggcagccattcctgagctgaacgcatagcctgcttccccgctttccagttctgtcacaagtgcttcgagagcggttcgagtcggattggccgttcttgaatactcgtagcctgtatgctgccctgctttcggctgcttgtacgtgcttacttgataaatcggcacggaaactgcgcctgttttctcatcacctgtgattccgccatgtatcatcaatgtttttttcttcatatcagatgcctccttcgtatatttgtttgctgatatatcgatcgctgctgtcaggaaatactgtgacaatgttagttccagcggatgcttttttcgcttcctccaatgccgcataaagcgctgcacctgaagagcttccgatcagcaggccttctttttctgccgcttctttcacaagtctaaacgcattctcatctgttacggtgtagatctcgtcaaaatggctcttatccatataatcggggataaactccatgccgatgccctctgttttatgagcgtggggctctcctccgtttaaaatcgagcccaccggttcaacaatcaccgttttgactgctggatttttttcttttaagaaggaagctgtccctgcgaatgtgcctcctgatcctgcccctgcgacaaatgtatgaatattcccatcaagcgcttcccacatttcaggcccaagcgtcttatagtaagtcgatggatttactcggtttttaaattgcaaaacgcaataagaattttcaatttcagtctccagctgaatggctttttgaatggcgccctgcattccgtcttgacgcggtgtatgaatgattgatgcgccaagcgcttgcataatttgctgtttctctctgctgaaatgttcagggacacagaaaatcgctttcagcccatattttctggcactcagcgcaaggccgatccctgtattgcctgccgtagcttctataatcactccgccgggtttcactttgcctgaatcgagcgcgtcacgaatcagcatatctcccagtctgtctttgatgcttccccctggattcatcatttcaagcttggcatacaccgccactccttctggaacatcaaagttcttcaagcggagaagcggtgtattcccaatcagctcggtaatgtccgtaatcactgtcatatatgtcctcctccttattagagggtgtttttagaaaaaacggaggagaacattctccccgttttaatgaattcgtttgatcacctttaacacaagctctgttgaatggacagccgcctgctctaaaaattggtcaaatgaaacatgtgattcttttcctgcaatatcagataacgctctgatgacgacaaacggcgttttaaattgatggcacacttgagccactgccgcagcctccatttcaaccgcatacaaatcagaaaatctcgtacgcacctcttcaacccgcttcggatcgttcatgaaagaatcgcctgttgcaatcgttccttttgcaacctgaatgccgtcgagttcagataccgcttcttcagtgatgctgatcagcttttcatccgccgcataagcagccggaagacccggcacttggccgtattcatagtcaaaagccgttacgtctacatcatggtggcgaacgtcagtggaaatgacgacatctcctacattcaatgtatgatgaaatccgccggctgagcctgtgttaataacataatcaggcttgtaacggtcaagcagaagcgtcgtgctgatagcagcatttacttttccaattcctgattttaaaagaaccacttcagttccttcatattcgcctgttgtaaattcacagtgtgcgatcgtttctgtttttgcattttcaagtttgtttcttaagatggtaacttcctcttccattgctccgatgactgctagtctcatctattcacattcccttcactttaccgtttgatcgcctccattatccacacgaagtcgttttgctgagtgaatcggactgcaaaaccttcagctgtaaacatttctttcaacgcatccaatgtaggataatgctctgtctctaaatcatttgcaagctgataaaagccttgagaacgggctttatcgatagcctgttgatacgcttgcgcatcttcaaagacggtatcggcaaacactattttatcatgcaagtgaaggtatttgccatattgctttatggcagcccgcttttcttcgtcagtcaaatgatgaaaagcatatgaactgacaattgtatcagcctgaaatggcggctcagggaatgtcaggaagtctccatcaacgatttccgacctgcctgaaagcttgtcagaagccagtttacgcattgctggagaaggttcgattccaaatacagttttgcctgcatcgagcagcttagccgtcaaattccctgtccccgggccaaattctaacacatgcgttccagatttgctgacgatggcatcaaggatatgatcatagcctctgaacgcttctttatactgaatatctaaaccttgtactgtttgatcataagttgctgcccaatcttcaaagagagggataaattcacgtcccatatttgtcacactccatatttaataattcctataagcatactatgaattaatgatggaacagttcctataataccacatcttctgaaaagcaggtactaaaacactttgtgtattttatgccatctcatattgcgcattgaccgcaaaaaagcttatacttcaaatgacttgtgaaagctggagggtcaagatatgaattttcaattagatctgattaaagacaaagtggaattttttgaagcggcttcattgcaggagcttgaaaagaaaatcaatacacaaattgaaaacaataaagccatcatgctccgggtgaaatctgtttcacaccaaactgctgtggcagaaggaagaatattgtacagcgcggtggttcatttcgcagctgaagcctaaaacaaaagcagccggttctaacccggctgcttttgtttattttagcttttctacttttgtcggcttccagccttttttatcaacccatgtaatcgtgacttgatatttattcccagtcgccttgtccaaaatcttgcctttagcatcctgagggctgccgttatttccaagccagagcaccgtcatgttatctgttgagacaccagttgcgtatgaaatggctttcagcatctcagcccagtcttgtgagcttgaatcataagtagcggcatgctcgccagcctgctcagttccgactgctttccagtcaggattttcatacgttttttccacatcgctcgatgagccgccttctgttacttttgcatctttaagcccgtcaccggctgaatctgagcttgaatctgaatcagagtcatcttttttagaagaagaatcatcttttttggaatcagagtcagaagacttctcagaatccttttcgctgtcagatgtatctttcttgctgtcttttatatcctcatccgatttcttttcagtctttcctgaagccggagattcctgtttttgcgccgtttcagaatccttgctgacatctttgctagaaggactgttaatgaagagattcgctgctactacgacaattagtatggatacgattgcgattaaaatgttaagcactaaattggcttttctgcgtttatcacgattttcataacgagattgattattgctcaataattctgcactcctttatccctcttggctcagcatatattttaacatgtgctgagaagttgttctatttctgattgatttcaatttcgtgtacttttttaacaatatcataaaacaccgaatttgtcagagccttatctcccggtgtatccatgtgtaaaacaaccagagcgtatttcggcttatccgcgggaaaatatccggcaaaccatttttcatagagcgtttccctctcttttgaaagcttgcctgtttgggctgtgcccgacttccctgctacagtatacggaagatcttgaaaccttctgcccgttccggaaggagattctaccacccgccgcagtattttttgaagctgctgtgacgtatatttgtctatcgtttcccctttgagcttctgatctttaaacgtaacgagcgttgtgccgttcttatactcaatttgttcggcaattttcacctgccgtttttctccgccgcgggcgattgtcgccatcatattggctacctccagcggcgttacctttacgtttttctgcccgattgctgtttgcgcaatggcttttttgactgatttgtctttttcatccccccaaatcacgccgcttttttcgttatacagctggcggaaatcggtttcgtggtacagttttccctcccagcctgcccgatcagtgagagccagcttctcggacatatcttcaataaccgagctgtcttttttcattaattgttctgcaagactcgtaaatgtgtaattacagctttgggcaaaactttcatcaaaagacaaggttcctttgtcgtcccccggttccccgtacaggtttaaattgcaattaaaggtttgactaggcttcaccatattattttcgattgcagctgcggcaatgactgttttaaaaactgatccgggatagattggcgtcagcatataattttgaagtgtgttttgccgggacacatctgcatctggtttgcttacaatccccagaacactgctattttcgatgtccagcagcacagctcctccctttttcagcccctgttcatccaatacctcctccatcgctttttgaatgctttgatcgatcgttgttttgacctggagcggataaaatgtattggcttcagctgtatatttgacgtccatgccaaacaaagggtttccttttccgtccacatgatataaaagctttgtgtcttgttccggaagcaaaaactcgtcaaatgtccgttctaaaccggttgttccgatttctgttgtaatcggaaggctctccttgtcaggatatttcttgcgaagcagcgccggatcttggttcgtgctccctatcgtatgtgaagcaaggctgggcttgtcttcattctccatatatacgccgtaaatgccgggatatttcaaagaattgatttttgtgatagattgttttgaaagtgttttgattttcttttgctgcaaaatgaccggtttttttgcctgacctagtgtctggcgcaaatcatcttcagacatgccgaggatgtccgcaacttttttgatcggccaatcctgcgtcagcagaaaagggaacaaaacaaccgcaggctcgctttgtcctgtcagcgcccgcccgtttcgatctaaaaaagagcctcttccatctgaaatgagcacttcctccgtccgctgtttcacactttcttgaatcaaattaattttctttttagaaaatgattctgtgaaaaacagctggatttctgcaagtctcagcagaagcagaaaaaatacaatcaaaaaagcgatgactgccagcttcattcgtttcgatatcttcataaaaaaaacacctcacccacattgtggacgaggtgtttcgctgctaaacagatattatgaaattttcacaattttcacgagcatttctccgcccggtgtttgtactgtgacttcttcatctacttttttgcccaagaggctttttgcgatcggtgaatcgtttgagattttcccttcaaacgggtcagcttccgcgcttccgacgatcgtatatgattcttcatcaccgtcaggcagttcgacgaaagtgacggttttacccaaaccgacaacgttagagccgccgtcatcttcaatgattttcgcattgcgaatcatattttcaagagtcgtcacgcggccctctacaaatgcctgctcttctttcgctgaatcgtattcagagttctcggaaaggtctccgaagcttctcgcaattttgattcgctctactacttcttttcgtttaaccgttttcaaatattctaattcttgttcaagtttttgttttccttctgcagtcataggaaaaactttctcttgtgccatgtcccttcactccttctggttgtccctcaacatcttcgattatgtatgagagcataaactaaaaaatacaagaatgagaacacagggcagtcctcgttcttctctcccatataggtactgtttatcttaaactgaatcgtgtcgttctgcaaatatttcgcgtttataaacagggaaagaagggaattcgcacattcccttcctgcctatacataatatggtcagagttatttatgtctatgctatggtattacaaaatcgcgttttgttcaagaatggtttgaatttttgtgaccatcagatcaattgcgacgtgattctgaccgccttccgggataataatatcagcgtatcgtttcgtcggctcgacgaattggttatgcatcggacggaccactgacacatattgttcaatgacagaatcaatagagcgtccgcgctcattaatatctctcataatccgtctgatgatacgcaagtcagcgtccgtatcaacataaagcttgatatccatcagatcacgaagccttttgtcttcaagaacaagaatgccttcaaggataataacatcctttggctctacgtgaaccgtttcttctgaacgtgtgtgaagcttatagtcataaatcggcttttcaatcgggcggtaattcaatagatcttgaatatgctcgattaaatagtcattatcaaacgcaagcggatgatcatagtttgtgttcagcctttcttcaaacggaagatggctttggtctttataataaaggtcctgctggatcattaaaattgagtgtcctttaaactgttcataaatggaccgtgtgacactcgtttttcctgaaccggaacctcctgcgattccaatgactactggattcttacccatgggctgttacttcccctttctcatcatgttgctcggataaatctttttgtctagtttgaatttgacaatttgcaggggatggcgggcagcatctagctcatttccgtcttcgtcccaaatggtttcaatcgtatgtgtaaagttttcgatttctggaccgaaaaattccacttcgtcgccttttttgaagaaattgcgctgctgaagcgtgaccatttgtgtatcttcatcataattcagcactaagccgacaaaatcatatgtcgttttcttggcgtgttcgccgaacatttgctcttcatagcctggcgttccttcaaagaaagctgtcgcagtgtccctgttggcgcacttatcaagctcttcaagccattctttttgaatcacaaagttttctggatcagcgcaataagcatcgattactttgcggtatacgctgacaacagttgctacatagtgaatggatttcatgcggccttcaatctttaagctgtcgatccccatttcaatcatttttggaatggattcaatcagcttcaaatctttcgggctcatcgcaaatggtgcatcttcttcaccatacaaagcaacggcgttggcaccgtctgtttggtagagatcataatcccagcggcatgactggcagcagcctccgcggttggaatcccgcgctgtcatgtgattgctcagcacgcagcggccggaatatgcaatacacattgcgccatgaatgaaggattcgatttcgatatctaccttttctttcatttctctgatttcaagagcgctagtttcacgtgccagcacgacgcggtcgagaccttcttccttccagaactggacagccttccagtttgaaagagactgctgtgtgctcaagtgaacctcaacattcggcgccactctgcggcatgtttcaataataagcggatctgccacaataataccggcaacgttggcgtctccaagcgcttttaaatagtcttcaagcccgtccatgttttcattatgagcgaaaatattcgttgttacgtagatcttcgcgccatatttctttgcgaattcaacgccttctgcaatttcttcgatcgtaaagttatcggcattcgagcgaagcccgtattcctgtcccccgataaagaccgcgtccgctccgtaatgaacagcgattttcagcttttcaagattacccgcaggtgcgagaagctccggctttttcgtaatcacacgctttccattaacgattgtggatattttatcatttacggcagtcatagcttaacctccttttgattaataaaccgtttccttgaagaagaatccggtatcaatttttctgtttactggctggatgctttcaatgcgttcgatccagtcttcttttttcgcttcgtattcgtcacggttttccacgcacaaatcaattgcttctctgtacattttggtgacttctattaggtattcaggcattttcaaaacaccatcgattttgaaagaatcaattccggcatctatcaattcctcgagctcatcaatgatgcacacatcgttcgggctcatgatgtgagtgccgttttcatcttcgaaaatcggatatttattatcgcgttctttatcgtgtaaaaacatgcctgattcttttttctttctttcaatgtccatgactttgccctgatattcaaaatagtttccaatcaaagaacgcttcgattggaacatgcacgtcattccatgcacctggatttcaatttcgacttcagcattttctttaatctcaacaatgctgtccatgtttaattctctggcaagcacagaacgcgccgcacccttgcgtccccagtagttgcatgtataatagttggtgcctgtcgtttctgtgctccaatgaagcttcagatcaggcgcagattcacgggcagccatcagcacggcaggatcgccgaataccgctgcatcgacaccggcttctgctaagaaagccagatattcgccaagctcacccactttatcattatggaaaattgcatttacagcaacgtatacttttgccccttctttgtgagcaatctctacggcttttgttacatcttcacgagaaaattctccggctaatctcaagccgtatctctgttccccaactaaaaacgcagttgccccagcctgtatgagcggcaaaatgtccgctgtactcgtcggcgtcactaagagctctggttttttcatgacgttcacctcttctttttactaatcgcaagtccgtccccgacaggaataatcgcagtttgataatccggatgattcatcagccaatgattatattcatcaattttggctacaagcctgcgccttctcttcggttctattttgctgtaatcctctgccaccagacctttaaacagcacgttgtctgttataatcaccccgtccggtgaaagcatcggttcatataaatgaaaaaagttttgatactgaccttttgcagcgtcaataaaaatgacatcgtaaggcgcggttacatgaacggcgtcggctaattcaagcgcatctccgtaaaaaacatgaatccggtcatcaagctgaaattccttgatattgtttaccgcttcttcatgccgtttctcattgcgttcaattgtatatatttcagcagacggcagttccagagccattcgaatggctgaataaccaatggccgttccgatttctagtatttttttcggctgtttcacagacaaaatttgaagcagcacctccatgcccgctttttccataatcgggacatgatgttcttctgcatatgcttcaagtctcttcacgttatccggccgaggctttaataatgcttctatatagtcatttatttgttcataccggtcagtcactacaaacagcctcccgttctaaaaaggagtgccccagtcttatgcgcaggacactctctgaatacatcatgatacatcggtaaacaacccgatatattttatcataaaaccttgcggaaagcgaacaaaaggagagctttttgctctccttttatttctcattttttgaggaaatgtatttttcttttgctttattatgctcttttagcgtttttgtaaatacgacctcaccatttgatttggccaagaaatacagatagtccgttttatccggatgcagcgctgcttcccatgatgacatgccggcattggcaatcggccctggcgtcagccctgtgtttttatacgtattgtatggtgaatcgatttccagatccttataaagaacccgatctttatgcttgcctgccgcgtacaggacggtcggatctgtttggagcggcattttctttttcaggcggttataaaagacgctcgcaattttatggcggtcggctttttcagtcgcttcttcttctatcaaagaagccattgtcagcagcttatgcacagaaactttgtttttcttcatttctgatttatatgtttccacataagaatttgtctgcttaatcattgccttgataatgtcttcaagtgatgtgtccggatcgttaaaagggtatgtagccgggaataggtacccttcaagcgggtgcttaatgtttttattgaaaacatcatttgtcacagtgtccgggaattctttcttcagctgattgataaatgtttcatcgtccagcttcgctatgacttgttttttagagtattttgtttcatcagcaatagcagccgcgatttgggtcagctgtgctccctcagtcactgtgatttgaaaagcgtaacctgtagccccgcttgtcagcttctgaataatggcatctaaatccatacctttattcagatggtagaatccggcctgaaacccggaagcacctttatatttcacatagtactgaaacgccttctcgctttttatgacatcatttttctttaatatcgatgcgatggctgaaacagacgaaccgctcggaatgttaatattaactgtcgttttactgtctttttcaacaggttcaagcaatgatttcccatataaaaatgccccgccaatgatgagaaacagcacaacaatggaagacagtatgattctttttttattaaaaaacgattttttttgctgattgatatacattaggtctcctcccatcagctcttatactacatgattcattgtatttcggcaatttattacaaaaagaggcctgcataaagcagaaaaaagccggagcagtatagctccggctttggtttggcgcgatgttttactcttcgtcttcgtccgctaagaatgtgtttagtgtttcttcgatcatatcccattcttcgtcagtttcaatcgggaatagctcaccgttttcaccgtcttcgtttggcgtgaagctggaagcaagaatttctacttcttcgtcatcttttgattcgattggatagtacaagacataagatttgccaaactcttcattttcaaatgtaaacagcacttcacaaagctgttcatttccttgatcgtcaacaattgtaatatttttttcgccgtgttccattttcttcacctctggctttaatttaagctgtcaagatatccttgtaaaatcataacagccgccattttatcaatgactttttttcgtttttgcctgctgacgtcagctgcaatcagcattttttcagccgccattgtggtaagacgctcgtcccacagcacaacaggaacattgtacgttgtttcaagcactttcgcaaatgtttggctggcttcgcctctcgggccgactgttccgttcatgttcttaggaaagccgagcacgattttatctatagtatagtcctttatcagttcagataaacgggataaaccataatcgccttctgcttcatttatctttatggtctcaatgccttgagcagtccagcccatttcatcgctcagagctacaccgagtgttttggttcctaaatcgagtcctaatattctcattctttatttacgcctctttatgctgttctaaataagactttaccaattcctcgattaattcgtctctttcaagtttgcgaattaaattgcgagcgtcacgatgcctaggaatataagcgggatcacctgacagcaagtatccgacaatctggttgattggattgtagcccttttcctgaagcgcgtcatacactgtaatcagcacctcatttacgttagtctcagcagaatcatcggagaaattaaatttcatcgttttatcaaacgagctcaccgttttgcacctctttcccaaattcgcaggcaaagttcagcctggggtcctaatcttaccatcattctacactacatgggcgaattataaaacggatttcacccaatcttctacagaagccaaagcttcttctaatttttccggctgtttaccgcctgcctgcgccatgtccggacggcctccgccgcctccgccgcaaacttccgcagcttgtttaaccagcatgccggcgtgaagtcctttctcaatgaggtcctttgtgactccggcagagatattaactttatcgttttgtaccgcaccaagcacgatcaccgcagagccaagctttgctttgagttcatcgaccatagtgcggagatgattcatgtcttttgcatttacttttgccgcaagcacgtttacgccgtcaacttcttttactttcgacaggattgctcctgcttccacgttgcctagttttgcaagaagagattcattttctctttgtgcatccttcagttcagcctgcagagccgcgacccgtttcggcacttctttgatatttgttttcagctcgtcagcggtctgcttcaatacagaaatctggctgttcatttcgacgtaagcgccttgtcccgttacagcttcaatccgtcttgtgcctgctccgattccggattcagaaacgattttaaacaagccgatttctgctgtatttctgacgtggcagccgccgcacagctctaagctgtaatctccaacttgaacgacacggacaatatcgccatatttttcgccgaacagtgccatcgcacccatttcttttgcttcagcgatcggtttcaaatcaatgctgaccgggatgctcgcccagatcttttcgtttacgattctttcaatttgttcgagctcttcttttgtcacttggccaaagtgcgagaagtcaaaacgaaggcggttttccgttacaagagagcccgcctgattgacatgagttccaagaacatcttttagagcctgatgcaataaatgcgttgccgtgtggtttttaatgacgccgcttctcatatggtcttcaacttcagccgtaacatgcaggcctttttgaacagtaccgctctccacaacaccttcatgcacatgctggccgttcggcgctttttgaacatctttaattcttacaactgcctgctcgcttcggagatagcctttgtcgccgatttggccgccgctttctgcatagaacggtgtttcatcaagaatgatttgaacgctttctccttcatgagcctcttcgattaattggccgtcctgaagaagcacaatgatattggcatcagctttggtttgagagtagccgacaaatgtgctttcaactgtcacgtcgcgcagtgcgccgccctgcacctgcatgctgccgacatcctggcgggcgtttcttgcccgttcacgctgctggttcatttcctcctcaaagccctcatggtcaaccgtcatgttctcgtcttctgcgtattcttcagtcaattcaaccgggaatccatacgtatcatacagtttaaacacatcagcacctgagataacgctgctgcccttgtctttttcttttttgatcatttctgacaggatcgcaagcccttcattaagggtctcatggaagcgttcttcctcggttttaatgacttttgcgatgaaatccgctttctctttcacttcaggatagaaatcagccatgatttctgcgacaaccggcactaaatcaaacatgaacggacgatggatgttgatcgttttggcataacgcacggcacggcgtaataagcgtcttaatacatagccgcggccttcatttgacggcagcgcaccgtcactgacagcaaaggcaaccgttctgatatggtcagcaatcactttaaacgcagtgtctttcacattgtctttgccatatgtttcaccagaaatcgattctgttgctttaatgatcggaacaaacaaatcggtgtcaaagtttgtcggaacattctggatgacagacaccattctttcaagacccatgcctgtatcaatatttttctttggaagcggtgtgtacgtgccgtcagggttatggttgaactctgagaacacaaggttccatacttccaggtaacggtcgttttccccgcctgggtaaagctccggatcttctggatcattaccgtatgcttcaccgcggtcgtaaaagatttccgtattcggtccgctcggcccttcaccgatatcccagaagttcccttccagacggataattctttcttcaggaataccgatttttttcgcccaaaactcatatgcctcttcatcttcaggatgaaccgtaacagagagaagctctttgtcgaagccaatccacttgtcgctcgttaaaaactcccaagcccatgtaatggcttcttctttgaaataatcgccgatggaaaagtttccgagcatttcaaagaaagtgtgatggcgcgcagttttacctacattttctatatcgtttgttctgatcgctttttgagcgtttacgattcttggattttccggcacgacacggccgtcaaaatattttttcagcgtcgcaacaccgctgttgatccaaagcagtgaaggatcctcatgaggcactaatgacgcgcttggctctaccgcatgtcctttttctttaaagaaatccaaaaacatttgacgcacttccgcagaagttaagtgtttcattgtatttcctcctctataaaaatcgaaattctcttcagtgacagcaaaaaagccctccccctatgcaaaccaacgtttacacagggacgagagctgtctcgcggtaccaccctgattacgggcattcatgcgcccgtcacctttaaccctgtaacgcaggataagcggcagtgattaactgcactcaggattagcttcctccgatcttctgataaagctcctttcagcttatggagcttctctctttaacagggcttcggcgtactcagatccgtcactcgagattcgtatgtattctacgagaaattatagacaagcggcacgccgatgtcaatgctccgtcctcatccgcaaaaaatggatcatcattacttttaaaacagccgtcgcaggaacagccagaatcatcccgacgatacccgcaagctcccctccggcaaggagtgcaagcatgataacgaccggatgcattttaaggcttctgccgacaatgaacggactgaggatatttccttccataaactgcagaataaacaccgtaatcaccacaacaagaaccgccttgactgagatcgtcatcgcaattaacaacgcaggaacagctccgatgaaagggccaaaatacgggatgacattcgttaccccagagataaggccaagtatcagcggatacggaagcccaaatacccagaacgaaatgcctgcaatcacgccaagaatcaagcagaccaaaagctggccgcggatataatcgccaagcgaatcatccacatcccgcaaaaaggcgctgccccgctttctccacgacttcggagtcaagtaccatactgtctttttcattaactcaatgtccttcaccatataaaacacgagaaaagggattgttgcagcaattaagaagtaatcaagcacattgcggatcccgctgatcgcaccctcgatcgttcccgcaaaaaacgcctccgtctggcggatcattttatctatacggtgatgcataccatcaggccagtcatccgtatggttatgcacatgaagaagaagcccgttatacgtttcggcaaacatgggtatattttctgacaaatccgtcagctgcacgattaaaacaggcacccctttatacaacgcccagccaatcccgccaaaaaaaagaacataaatgaccaagatgctcaaagtcctaggcaatcctttgccatgcagccattctgtgaccggaagcaataaataagatataaaaatagaaatgatcaagggaataaagatcgtttttatgacgagccaaaagggtgaccataacatatcaagcataaaaaagacatagactgttaacagaaccagcaaacaaatagccacccacaacaaaagctgcaccggtttttggagcatctgctttcacctcacctatatcttttgaggtttacaaggaattattctttatgtttctttagtcagtcagaagtcatggacattttttcacttttaattttcagaaaagtttgatcatttactttttggtcaaattttctgataggaggattgcgatgatcacatttcaaaatgtaaacaagcattacggagattttcacgtgttaaaacaaattaatcttcaaatcgaaaaaggtgaagtcgttgttatcatcggcccatccggttccggtaaaagcacattgctcagatgcatcaacagacttgagtcgatcaatgagggagtgcttacagtaaacggcaccgccattaacgacagaaaaactgatatcaatcaagtgcggcaaaatatcgggatggtgtttcagcactttcatttatatccgcataaaacagtgctgcagaacatcatgctggctccggtaaaagtgcttagacaatcacctgaacaagcaaaggaaacggcgcggtactatcttgaaaaagtcggcatcccagacaaggctgacgcctatccttcccagctttccggcgggcagcagcagcgtgttgccatcgcaagaggactggcgatgaagccggaggtcatgctgtttgacgagccgacatcagcacttgatcctgaaatgatcggtgaggtgctagatgtcatgaaaacactcgccaaagaaggcatgacaatggttgtcgtgacacacgaaatggggtttgccaaagaagttgccgaccggattgtcttcattgacgaaggaaaaattttagaagaagcagtgccggctgaattttacgcgaacccgaaggaagaacgggcccgcttattcttaagccgtattttaaatcattaaaacagaaatggggagcttgtatgaaaaagattttttctttagcattgatttctttattcgctgtcatcttgcttgccgcttgcggcagcaagggatcaaacggagaagcctcaaaggagagcaaaaaagatacgctagccgccattaaagacaatgacaaaattgtcttcggcgtaaaaacggacactcgactgttcggtcttaaaaatccaagctcaggtgagattgagggttttgatattgatattgctaaacaaatcgctaaagacattttaggtgatgagaaaaaagctcaatttaaagaggtcacctcaaaaacaaggattcctatgctgcaaaacggggatatcgacgccattgtcgccacaatgacgatcactgaagaacgaaaaaaggaagttgacttttctgatgtctatttcgaggccgggcaatcgcttctcgtgaaaaaaggcagcaaaatcaagagtgtcgagaatcttggcaaaggctcaaaagttcttgcagtaaaaggctccacctcctctcaaaacattcgtgaaaaggcgcctgaagcatctgttttagaatttgaaaactacgcagaagcctttacagcccttaaatcggggcaaggcgatgccctcaccacagataatgcgattttatatggaatggctgatgaaaataaaaattatcaattaacaggaaagccttttacagatgagccttacgggatcgccgtgaaaaaagggcaatctgctctcgcgaaagaaatcaacgcttcacttaaaaagatgaagtcggatggcagatacgatgaaatttataaaaaatggatcaaagaagacccagctgaataacaaccatcccgggatgagcaggcgatgctcatcccaatttgataaggagtgaataggcagatgaatgtgtcaattcttttcgataacttcagcatgtatatggacggtttttaccataccttgctcgcaagtgttatcgcgctggccggcagttttgtcctcggcgttgctgtagcggttatgagaataacagtctttaagccgctgcaatggctcgggaccgcatatgtagaattcatccgcaacatccctcttcttttaattacctttgttttctatttcggacttccaaacgcaggcctgaggcttgacggttttcaagcgggaacggttgctctcaccatttatacctctgcgtttatcgctgaagccatcagagcaggcatccagtctgtttcaaaagggcagatggaagcggcacgctcgtcaggctttacctacagccaagccatgctccatatcattttgccgcaggcaatcaaaatcgtcattccgcctttaggcaatcaatttttaaacttagtcaaaaactcttcgattcttggggttgtggccggattggatcttatgtaccaagccgatttagtttcgtcgagcacactcgttgtatttgatgtttatatttttgtggcgcttttttacttagtgctgacgattccgcttagcatcggtgttaactatctggaaaaacggctggaaaaaagctattgataaggagtgagttacattggatttcatcggtgcttattcacaggagcatttagcgtttttatgggatggctttctcgtcaccttgtacgttgctttcatctccatcattctgagctttttcttcggtttaatcgcaggcaccctgcgttatgcgaaagttcccgttctttctcaattgattgcagttctcgttgaaacgatcagaaacctccccttgctgttaattattttctttacgttttttgcccttccggaaattgggattaagcttgaaattacagctgctgcaattacagcactaacgatttttgaatccgctatgctatctgaaattatccgaagcggactgaaatcaattgacaaaggacaaattgaagcggcgcgctcctccgggctgagctatacacagaccctgttctttatcgttatgccgcaagcgcttcgccgcatggttccgcccatcgtaagccagtttatttctttattaaaagatacatcgctcgctgttgtgatcgccctgcctgaactgattcacaacgcgcaaattattaacggccaaagcgctgacggcagttattttttcccgatctttttacttgcggcccttatgtatttcgcagtcaactacagcctttcactcgcagcaagacgcctcgaggtccggcaaacatagaaaaggatactctttggagagtatcctttttgcattaaaacattttcgtaattcttcttctcatccgcttcatgcttcgattattcagcatgtcagattgagtcgccattcggtacacgagagctccggctcccattgccaaaagagaagtcatcgtccgattcatcctgcgcatctcctttcatgattaaaaattgatgctgcgttcatcctcagaaaacaaatcatccaagctgcttaacgttccgtcttcttccacctgatgagttgcaatcttccctttcgccactgtcagttcaataaaacagccccagcaataatattggttcacgccgattttgccgatatccttacttttgcaattcgggcatataagcatacctcacacctctatccgttcagaacgatctcgtctttccgcacctcgacaagcgaatccgctctttggatctggcgcttgcttcccgcaaggtcagaaaagaaaccgtccgagagttcatatgctacgattatgcccctgtccaaacaaaagtatacatcttccagcatccccaatatatcgccctcttgcgatttcacaagcttcatcttcatctgctcgtatgtgaagcatgatttcggaagaggcaaaagctgttctgaactgaccgaagccaatatgcggtcatcaagaatggaagagatatcacacgcccgtaatagcgcatgatgatgatgcaaaaagcgtttttgtgcaagaataaacccaagacaatctcctttcagagaaaaacaaatatcggaaattgccccgagataacaagaagttcgttctgagtatactgggaatccttctacttcatggcatgttctcaaagtgtgatcaaccaccttttgttgaacaggcttaggttttgctttgcgccttagactcatacgatgaaatcaattccactgcaaatgaaaaaaactcccgcttgcacgggagcattttattgctgttcttctttcataaaatcgaatggtgtaatgccttccatgccaatgttggcgtcgtgtacgctgaacgggagctctttttggagagcctcaagctcggcatccatttcctcaacctgtacggacagcctgttttttaaggaggtctgtctgacagttgcatcattatttttcacgccccactccagcgcctcctcttccccgcataaaatgagaaatttcttcgctcttgtaatcgcggtataaagaaggtttcttctgagcattctataatagcctttcacaacaggcaaaaccacaatcggaaattcacttccctgcgatttatgaatagaacagcaatacgcatgggtaaattgattaaaatcttttttcgtaaatgtcatttcattgccgtcaaaagaaacgacggccatgtcttctttttctgtattttcctttgcataaaatatcgacgtgatttcgccaatatctccgttgaacacattgttttccggctgattgacaagctgcaaaattttatctccggttctgtagacaacatccccgaacttcaattctctccgtttttctttaggaggatttaaaatgtcctgcagcatcacattcaattcattaatgccggcttttcctctgtacatcggagcgaggacctgaatgtcctttgctgtatagccttttttcaatgcattggcgacaaccttctcaactacttctttgatttgcgacccgccgcagcgaataaaggaacggtcctttgtcggggcagtcaaattgttcggcagcaatccatttttcatctggtgggcaagctcgacgattgatgacccttctgcctggcgatagatgtctgtcagtctcacagtcggaatcacctgggatgccagcaggtctctgagcacttgtcccggaccgacggaaggcagctggtcttcgtctccgacaatgatgatttgtatatgatcagggatcgccttgaacaaatgattcgccagccatatatcaagcatactggcttcatcgataattaacagcttcccttcgatcggctgatcctctgtatgagtaaagccttcagcaccgttccagccaagcagcctgtgtatcgtaactgcaggaagtcccgttgattcactcatccgttttgctgctctccctgtcggagcggccaaaacaatcggaaaagcttcatcctttttataagctgacggatctagtgacacaccgtgaagctctccgtagagctcgacaatccctctgattaccgtcgttttccctgttcccggaccgcctgttaaaagaagcatcggcgaggaaagggctttttgaatcgcttccttctggctgggggcatactgaacgttcatccgttcttccagttctcccaacgcgagcaaaaactctgattcgggaaactggttctcatattcggtttggctagcgatatgtttcacacgctttgcaacgttttgttctgcgtaaaacagcgaaggaaaataacagcggccatcttctatgacaatgtctttattttctccaagggcaataatcgcgttagcggcatccatttctgtgatgcgctgcccttcccttgctgactggtttaacagagattgggtgtcaatgatcagctgttccgtttctatgtacgtgtgcccctctgacagacaagtcgtttcaagcgtgtacaaaatagcagcttttacccgctcaggatggttacccgaaagacccattctgctgcccagctcatccgctttcccaaacccgatgccttctacatccttcacaagctgataaggattttcctgaatcttttcaagcgtctcagattcataggcttgatagattttcatagacagctgcgggccaaaaccaaactgattcaaggaaatcatgatttgctccagtccctgatgccgctgcaatgcgccagccagcgtgtcggctttcttttttgagagtctgggaacatcataaagcactgaagcgtcagccaatattttattaatggcgctgtcgcccagctttttcacaatttcttcagctgtttttttgccgatcccctcgaataaatcactcgataaatattgaatgatgccttccttagtcgttggaatctcctttttgaaatgctccgcctgaaattggagcccgaattttggatgagttacgatctttccgtaaaacgtgtaggtctcttcttcttgaagcgcagggaagtagcccgtcacggatacggctttatcttcaatggcttcggaggtctctgtgactttcactttcagaaccgtatataaattggtgtcattatgatagatgactgtgttgactgtcccttttaaatagggctcttcctccagtttaagctgatccggatgctgctgcacgagctgtccctcctcctgtgcctgttatgatggatcaatcagttttttagcatgaagcgcaagcatatgatctggctggatatcgattgccttgtccagcatttccagcgctttttctcggttttctttataagcataagcgacaccggcattataaaatgcatctgcatgccccgggtcttgctctgtcacagctgagaattggctgagcgcttcgtccagcatgccctcgttggctaagcacatcccgaattgaaagcgcgcttccgtatcgttttcattcagttcgactgctctttgtaaatatggcagtgcaagcttaggctgttcgagcttgacaagcaccgttccgagcatgtaaaacaggtcgccgttttccatccccgcacgaagcgctttttcaaacatgtctttggcttctttgtacatttcttttacaacatagacatttcctgctccataataagcagtggctgcgctactgtctaattcaagcgctttatcataaaacgcaagcgcacgttccagctcgtttacggatgaaagaaggttggcaaaattgatatacggaatcgcgtcttctttattttcttcaatcgcttttgtaaatgcctctgccgctttctcgtaatcgccttcctgcatcgcctctataccgagttgattataatccaccgatcatcttcctttcattaaaaaaccccaactcagtgttgaggtttttcatcttttatacgtaccacaattttgttccgtctttgtacacatcatcaattgtcccgccgccaaggcattcttcgccgtcatagaagacaacggcttgtcccggcgttacagcgcggacttgttcatcaaagatgacttccgcttcaccctcgccagtcatgcgcaccgttactttatgatcttcttggcggtaacggaatttagccgtgcaggaaatctcttcgcccttcatgatatccgaacgtacccagctgatatttgttgctgtgattttgtcagaatataaaagcgggttatggaacccttgatccacgtagaggatgttcttttcaagatctttgcctaccgcaaaccacggctcgccgcttccgccgatgccaaggccgtgacgctgtccgatcgtatagtacatcaacccgtcgtggcggccttttacttcgccgtccatcgtcatcatatcgcccggctgtgcagggagatattggctgagaaacgttttgaagttgcgttcgccgataaagcagatgcctgtactgtcttttttcgtcgccgttgcaagttctgcttctttggcgatttcacgcacacggcttttttgaagttcgccgatcgggaacatgactttgctcagcgtatcttctgtcagctgattcaggaagtacgtttgatccttgttttcatcaatgccgcgcagcattctgacttttccgccgcttctgtctactcttgcatagtggccagtcgctaaatagtcggcgccaagtgacaatgcatgctccaaaaaggctttgaatttaatttctttgttgcacaatacatccgggtttggtgttctgcctgctttatattcatcaaggaagtattgaaataccttctcataatattgcttttcaaagtttacggcataatacggaattccgatttggttgcagacgcggatcacatcttcataatcctctgtcgccgtgcaaaaaccgttttcgtccgtatcatcccagtttttcataaagattccgattacatcatagccctgttcttttaacagcagggccgccacagatgagtctactccgccggacatgccgacaacgactcttgtatcctccggccgtttttccatttcattcactccaattactacgccgccttattgtgtcagccgtttgacaacgtcggccacatgtttggcagcagttttcacttgctcagccgtattgccgaggccgaagctgattcgaatagaggacgtcagccggtcactctcttcgccgaacatagcagtcagaacatgtgacggcaggactgaaccggccgtgcacgctgaaccgctggagacagcgacaccagccatatcaagattaaccagcagcgcttccactgacacaccggggaaataaagattcagaacatgcggcagactatgctctttgtccccgttgacctcgaatgccacacctgcatctctaagcgtgtcggcaaagattgctttaaacgattgatacttctcgtttttttcgtcacgttcttcacttgacagcttgatcgcttctttcagcccgacaatgcctggaacattttccgttccggcacggcgttttctttcttgctctcctccgaataaaagcggtgaaagcttcacatctttactagcatataaaaagcctgtcccttttggcccgttgagcttgtgcccggaaacagacagaaggtcaatatggctgtttttcacatcaattggcagcaacccgaatgcctgaacagcatcggtatgaaaataagctttgtgttcctttaacagctcaccgatttcttcgatcggctgcactgttccaacttcattatttccatacatcactgtcacaaggattgtatcatcacgcagtgcttctttcacctgttttgcactgactcttccattttggtcaacgtccagatacgttatgtcaaatccgtcttcctcaagtttttcacatgtgtgaagcacggcgtgatgctcaatttttgttgtgatgatatgtctgccaagatcttttcttgcaagtgcggttcccatgatcgccaagttatcagcttccgttcccccgcttgtaaaaatgatctcctgctctgccgctccgatttctgctgcgatctgcgctcttgcttcatccacccattttcgagattctctgccaaatgaatgaatactggagggattaccgaaactgccggagaagtgcggtatcattttttccagcacgcgctcatccatcggagacgttgcggcatgatctaaataaatccgttccattatgtttacacctctgatctaaatatagaacatataagcttcttgctctccgtctgtatagctggcaagatcctctaatgttgtactgtctaaaacctcttttacagcatcccggatgcgaatccagagctcacgcttggcaggctcctcatcttccagcacttcaacagggctgatcggcccctcaagcacacggataatatctcccgcagtaatggcatccggctcactgcctaatacatatccgccatatgcgcctctgatgcttttcactaaaccggcatttctgagcggcgataccagctgctccaaataatgctcggacaaattattcgtctgtgcgatgctttttaatgaagtcgggccttcaccgtgcttttttgcaagctcgatcataatggtgagcccgtatcttcccttagttgatattttcaacatgaacacctctgttatttcatgattttccacatttataatggtaatttctatatgtttcgtccgtttattatcttatagaccaactgttattataacataccttcagcgaattttcattgaggcagaaggaaaggggcctttacccttttctaatgtacggttttccgttaccctgtaattaagtaaggagagatgatagatgaagccattggcatatcggatgcgtccgacaaaaatagaggatattatcggccagcagcatctggtggctgaagataaaattattggcagaatggtccaggcaaaacatttgtcatccatgattttgtacgggccgcccggaattggaaaaacatcaatcgcaacagcaatcgccggttcaacaagtattgcttttcgaaagctgaatgctgtcattaacaataaaaaagatatggaaatcgtagctcaggaagccaagatgtccggccaagtgattttgattctggatgaagtccacaggctggataaaggaaaacaggattttctattaccctatttagaaaacggaatgatcattttgatcggagcaacgacggctaacccgtatcatgccattaatccggcgatcagaagccggacccagatttttgagcttgaaccgttaacacctgatctgattaaacaggcactggaacgtgcgctccatgatgagcatcggggccttggcacctattctgtatccattgatgatcaggcgatggagcattttgcccacggatgcggaggagatgtccgctccgctttaaatgcgcttgagcttgccgtgttgtcaacgaaggagtcagcagacggtgaaattcacattacattagaaaccgcggaagaatgcttgcagaaaaaaagcttttctcacgataaagatggtgacgcgcattatgatgtactgtccgcttttcaaaaatcgatccgcggctctgatgccaacgctgctcttcactatttggctagattaattgaagccggtgatctggagagcatcgcaagacgattgcttgttatcgcctatgaagatatcggtttagcaagcccgcaagccggtcctagagtgctgaacgctattcagaccgctgagcgagtcgggtttcctgaagcgcgaatcccactggccaacgcagttattgagctttgcctctcaccgaaatcaaactctgccattctggcaatcgatgaggccctggcagatatcagagccggaaaaattggggatgtcccgaagcatttaaaagacgcgcattataaaggagctcaggaattaggaagaggaatcgactataaatacccgcacaattacgacaacggttgggtcgaacaacaatacctccctgatcctctgaaaaataagcaatactataagccgaaacagacaggaaaattcgaatccgccttaaagcaggtgtacgataaattaatgaaaagaaaataaaacaaaaacagccttgatcatcaaggctgtttttatgcattatttatccttcacacgtttgatttcaatgtctttcaaaagatccatgacaacatgtccgcccataatcaaacctgcaactgacggcacaaaagcattagaggaaggcggcatttttgctttacggattttcgcttcgtcattccccacttcttttctgacatcttcccgaatgacaatcgggctttcatcagagaaaatcacttgaacgccttttttgataccctccttgcgtaatttcgtacggacgaccttcgcaattggatcagtgtgcgtttttgagatatcagcgatttggaagcgtgtcggatccgttttatttgcagcacccatgctggagatgagcggaatatcccgtttcagacattccttcattaaatgaattttataacaaatggtgtctgacgcatcaatgacatagtcaagatcatagtcaaaaaactgctcatacgtttcctccgtatagaacatttttaacgagattacttcacactccgggttaatgtctgcgatccgcgccttcattaaatcaactttcggctgtccgacagttgaaagcagcgcgtgaagctgacggtttacatttgtaatgtcgacatcatctttgtcgacaagcagaatgcggccgacgcctgaccgcgcgagagcttccgccgcgaacgacccgactcctccgactccaagcacagcaactgtgctgtttttcagcgtttcaaggccttcttttccgatagctaattcattgcgtgaaaactggtgtaacaagaacctcactccacattcgtattctggtttcatctataaaatggctgatccatgagcagccgtttttctgcgcacaaaaaataaagtcccaatagtgccgttgcagctttcctttgttttgaacccgctctcagcaggtgggtgccctcttttaaatcttgtaagtcctctttaccgaatgaaaagaggcatgtacgccatttaaaaatgcgggctcccaaatcaaaaaaatgttcggtcaaaactaggtgtacaactaacacatcaggactttatttaacttgtcaaaatcatatcacagacgattttgattttcaagaatccaactgcacattcagttcttaacttttttcttgatagaaagatgaagctcgtcaagctgagcgtcacttacttctccaggcgcctctgtcatcaggcagcttgcacttgccgttttcgggaatgcaatcgtatctctcaggttcgtacgtcctgcgagaagcataacgagacggtctaagccaagtgcgattccgccgtgcggaggagcgccgtattcaaatgcttccagcaggaatccgaactgttcagccgcttcttctggtgagaagccgagaagcgcaaacattttttcctgaatatccttttcaaaaatacggattgaaccgccgccaagctcatagccgtttaagacgaggtcataagcttgtgctttcatgtcttcaggcgctgtttcaatcagctcaaggtcttctcggacaggcattgtgaacggatggtgtgctgcgtaaaaacggccttcttccggatcatgctctaataacggccagtcgatgacccataagaaattaaacaatttttcgtcaatcagcccgcgctctttcccaagctttaagcgcagggcgccgagtgatgcggccacaacttcgaattgatccgctccgaacagcagcaaatcaccttcagcagcatcaagtgcttcaatcagcttagactgcttttcttcatcaaagaatttagcgatcgggcctttcactccgtctgcctcaaccttcacccaggcaagcccttttgccccgtagtttgcagcaaaagcgccaagagcgtcgatgtcttttctggagtaatcgccggcaccgccttttacgttgatggctttaaccacgccgccgtttgctacagctgatgagaacactttaaattccgtatcctttacaatgtcagacacatccgtcaaaagcatgtcaaaacgcgtatccggtttatcagaaccgtacttgttcattgcttcgtcatacgtcattcgaggaagaggaagcttaagttcctcaccttttgtttcacgcataacctttgccatcatctcctcagccaatgacataatgtcttcctggctcataaaggacatttcaatatcaatttgcgtaaactcaggctgacggtccgcacgcaagtcttcatcgcggaaacagcgggcaatttgataatatcgttcaatgcctgataccatcagaagctgtttaaatagctgcggggactgcggcagcgcatagaactcaccttcgtgcacacggctcggcaccaagtagtcacgtgcgccttcaggcgtgcttcctgttaaaatcggcgtttcaatatcaagaaacccattttcatctaaaaagctgcgaacagctttcgtcacgttatggcgcagctgcatcgtctggaacatagccggtctgcgcaaatctaagtaacggtgttttaaacgaacgtcctctgacacttcttcagcttgatcagaaatcgcaaatggaggtgtctttgcagcatttaatacgttcactccatcagcatgtatttcgatcgcgcctgttttcaaattcggattaactgttccctcttcacgcgccaccacttttccttgaatatcaagcacgtattcatttctgatgccttccgcgatagcaagcgcttcttttgacacatcagggttaaaaacgacttgaacaatgcccgtacggtcacgcaagtcaataaaaatcaatccgccgaggtctcgtcttttttggacccagcctttcagcgttacagattcgccaattgctttttcagttatatcaccgcaataatatgttcttccaaacaatgcgtttcactccttatcccttttggtttgccttcatcacatgtataaattcatcaagtgccacttcaatctgttcgcccgtctgtgcatcctttacattgattttgttttgggcaagctcatcttcacccaaaatcgcaataaatctggcctttaagcgatcagctgttttaaactggcctttcattttcttattttcataatcgatttcactggaaatgcctgcttctctcagtttgtacaccaatgaaacagaataatcctttgctttttcgccgagtgtgacgatatagcagtcgattcccttatcaacaggcagctctcttttttcagcatcaattgcggcaagcaagcgttcgatgctcatcgcaaatccgatgcccggtgcttcaggtccgccgatctgttcgacaagcccgtcgtagcgtccgccgccggcaagtgtcgtaatcgcgccaaagccctccgcattgctcataatttcaaatgcggtgtggttgtaataatccagccctctcacaaggttcggatcgatttcatacgaaatgccaagatcatttaagtattgtttcactttttcaaaataagcggctgattcttcatttaaatatgtcaaaatcgaaggtgccgatttcatcagctcatgatcacggtcttttttgcagtccaaaattctaagcgggttcgtgtgcagccgggactggcagtctgaacaaaattcttcgatgcgaggctcgaagtgtttcacgagcgcttctctgtagcttttgcggctatcttgatcgccgagactgtttatgacaagcttaacgttttctaaacctgctttttcataaatactcatcgcaagcgccattacttcagcgtcgattgcagggtctttcgaaccaatcgcttcaattccaaactgataaaactggcggtaacggcccgtctgaggacgttcataacggaacatcggcccgacataataaagctttgtcggctgtacaggatttgcgaacagcttgttttcattaaaagcgcgaaccgcagcagctgttccctccggacgaagcgtcaggcttctgcctttgcggtcctcgaaggtatacatttctttttgtacgatatccgttgattctccgacgcctctggcaaacagttctgtatgctcaaaaatcggtgtgcggatttctttatattgataagtgcggcaagtgtctctcataatttgttcaacaaactgccagcgatctgattctccaggcagaatatcctgtgttcctctcggaatgttatatcccataggtagacctccttatgtattccttataaaatatccaatgatcgttaatgatgaaaatgaaaaaaactcccgcccctactatacatgatagtagggacgagagttatacccgtggtgccaccctagttggaatacgttcatattcccgctcgatcctttaacgcaggttcacgttcactgcctaatggcgttattcacgcgttcagcaggaaacctccggagtgttgtttcgagaaagacgcaatgggatccgctttcagcctggggcgggttcctctctaatcatgcaatctgacctactcttctccattattggttcaaatctttcatcatttgctatgtactcaatttctattataataatgggattggggttctctgtcaagctttattccggttgtttttcctcagcgctgcttctttggacataagaccaaattcagatgctgtttccgtaagataaccagtcgtatcgggatctgcgtgatcgctgtaatgcagattcgcttcaccgtcgtgaaatgcacgtcccatttttggatgatatttcatgatttgcacacctttttgattgtatttacgcttagtataaacaaatcattttatttttatttaaaaatcagaaaggactttacgatattaaacaagaatgcttttttaatgatcatcagaaaggaggacacaatgaacaagaaatactttgtccttattgtatgtattattttcacctcagcgctattcccgaccttttcatccgttacagctgctcaaggagaagcggtcatcgcaacagatgaaatgaacgtcagaagcggcccagggcttagctacggcattacagcggaagtaaaaaagggagaacgctatccaattttaaaggaagatggagactgggtgcagatacagcttggttctggagaaaagggctgggtagtctcctggcttattacaaaggaagaccaggccagcacaagctcctcaggaagcagtgacactgtgacatcaacagaccccgatctgcggatgagaagcggcccgggcacttcctacgaagtcatcggcaaattcccgcaaggcagccaagcatctgtcattgataaagattcgggctggatcaagatatcctatcacagtgccaccggatgggtatcatctgaatatgtcacatcaggaggcagcagttcagcgtctgatgagagtgaccaaaccgaggattccggtgcgtcaacgacgggcacagtcggtgtttcttcgctaaatgtaagagcctccgcctcacatgacgcggcaattataacaaaacttgatcgcggaacgaaactgacggttctcaacgagaaaaatggctgggctcacattgaggtgaacgggctaaaaggctgggttgcaagccattaccttttgactagttctgttccagctgatgattcagcaaatgccggcagttcatcctccgctaaaaaagcctatatcatgtacggaggaacgaatctaagaagtgatgcgtcaacatcagcttcgatcgttgagcgcgctgccaaaggagattcatacaccattaccggttcaaagggaagctggtatgaaataaagcttgataacgggcagactgcttatgtagccaattgggtggtccaaacgtctaaaagcgcagaagaagcaggtgaaccgccagtctctgattccccgtctggaaacggctctctaaacaataaaacgattattgttgacccgggacatggaggaaaagacagcggaacgatcgggtattcggggaaattcgagaaaaacctgacgatcaaaacggcaaaactgctcgccagcaaacttagatcggctggagcggatgtatatgtgacacgccaggatgatacctttgtcagcctgcagtcacgggtctctacctctcactaccgtaacgctgacgcctttatcagcattcattatgacagctatgcggatacctctacaagaggcagtacagcatattactacagtcctgccaaagatcaggaactcgcatcagatgtccactcagaagtggtgaagcgttcttccattccagaccgcggcgtattattcggagattattatgtgctccgggaaaacagacagcccgctatgctgtacgagctgggatatgtaagccatccgcaggaagaagccattgtacatagcaattcataccaagaaaaagtaacagatgggatcgaaagcggattagagaaatacttccaataaaaaaagctgccttttggcagctttttttattttgaatccataatgagcgtgaccggtccggagtttgtaagctgaacatccatcattgctccaaacgttccggtctccactttgattcctttttcacgaagcaggtcattccatttttcataaagacctaaagctttatcaggtttggccgcgttcatgtagttcggccggcgcccttttttcgtatctccataaagcgtaaactgtgagacggataaaatctctcctcctatatctacaagagacagattcattttcccttcactgtcatcgaaaatacggagattgacaactttatcggctaaataagctgcatcatcttctgtatcatcgtgagtgatgccgaccagcaccataaggccttgtccaatttggccgacgacctcttcgtccactgtaacgcttgcttctgttactcgctgaacaactaatctcattttctaacccctttagttcatgacgcggcgcacagagtagatatctctaatctgtttaatacgctcgacgactttgtgcaagtgattgatattctgtatgaaaatcgccatatggatggttgccactttattgcgatccgatttgccagagacagatgaaatattggttttcgtttcattcactgcctggagcacctcgttcagcaatccgcggcggtcatacccaagaatctctatctcaacattgtattccttgcgcttttgaacttgtgactcatgctcccactctaccgggatcagccgctcttgggcttcattcgttttgacattcggacagtcttcgcgatggaccgaaacccctctgccttttgtgataaagccgacaatatcatcacctggcacaggattgcagcattttgataaacggacaaggaggttgtcaatgcccttgacacgaacgccagcttcccgttttcttccttgcgggtatggcttaggttccccagtgacttcctgaacgatcttttcctgttcttcctgatcgcgctgctttctctctttttctgttaggcggttcgccacctgcagagctgtgatgccgttgtaaccgaccgccgcgtacatatcctcttcatttgagaaattaaatttgtcagcaaccttttgaatattctccggcgttaaaacatccttcaattcaaaatccaagtttttaatttctttttcgaccagctcacggcctttttcgacattttcttcacgccgctgtttcttaaagaattgacggattttatgcttcgcttgggatgtttgggcaagcttcacccaatcctggctcgggccgtaggaatgcttagaggtgagaatttcaacgatatcacctgtccgaagcttatggtcaagcgtaaccatttttccgtttactttggcaccgattgttttattgccgatttcagagtgaatccggtaagaaaagtcaatcggaacagaaccggacggaagctcgattacatctccttttggcgtaaagacatacaccatgtcagagaacaaatcaattttgagcgattccataaattcttctgcatctgtcgattcattttgaaattctaaaatttcacggaaccaagaaagctttttctcaaaggttgcaccttcattggctgctttcccttctttataagcccagtgagccgcaaccccgtattccgctatttcatgcatttcaaaggtgcggatctgcacttcaagcggatcgcctttaggcccaataaccgttgtatgaagcgattgatacatattcggcttcggcattgcgatataatctttgaatctgccgggcatcggtttccagcatgtgtgaatgatgccaagcaccgcgtagcagtcctttatgctattcacaagaatacggacagccagcaaatcgtaaatttcattgaattgcttattttgcagcaccatttttcgataaatgctgtaaatatgtttcggacgtcccgagaagtcagccttgatatttacttcttcgacacgtttcttcacttcattgacaacctcatcgacataaagctcacgttctgcacgtttcttcttcatgaggttgacaattctgtaatattgctgagggttcaaataacggagcgccgtatcttccaattcccacttaatttttgaaatcccgagacgatgcgccaaaggagcaaaaatttccagcgtttcattggagattctccgctgtttttcctgaggcagatgtttcagtgtccgcatattgtgaagacgatccgccagcttgatcaatatgaccctgatatcttgagccatagcgacaaacattttgcgatgattttccgcctgctgttcctcttgagatttatatttaattttgccgagtttcgttacgccgtctacaagcattgccacttcttcggaaaatgcttctttcaggtcatcgagcgtcacatctgtatcttccacgacatcgtgcaaaaatccgcccgcgattgtggaagggtccatttcaagatcaacgagaatccccgcaacctgaatcggatgaataatatatggctcgcccgatttgcggtattgctcgcgatgagcatcttcagcgtacagatatgctttttcgacaaatgcgatatgctcatcagatagatagctgcgcgctttatctataacttgctcggcagtcaatacttgttcgttcgccatggaatcaccttttttaaaatgtaaactgtattgtagtttattatcaagaaaaaaacgaaagatgtaaagagcagaagttcaaatagccaaatattatataaaataaatgcaaaacaataggaaaaaagcaccctgacatggagtgctttttcgttatgcggttatccttagtatttcatcaatgttaagatgtcgtaatcttcgagcttatttctgccgtcaaggtaagaaagctcgattaagaaagcgataccagcaacaacgccgccaagttcttcaacaagtttgattgtcgcttcaattgtgccgcctgtcgcaagcaggtcatctgtaataagcacacgctgaccaggcttaatcgcatctttgtggatcgttaatacgtcttttccgtattccaagccataatccactttgattacttcacgaggcaacttgccttctttgcggaccggcgcaaaacctacgccaagcgcgtaagcaacgggacagccgataataaagccgcgcgcttcagggccaacgaccaaatcaatttgcttttctttcgcatattcaacaatttgatctgtggcatagcggtatacatcgcctttatccatcagtgtcgtaatatctttaaattgcacgccctctttcgggtaatccggtacaattgttacgtattgttttaaatccatctgttttatgtcctcctcgtactttcataagcctctgaatcttgtttcatcagcttattcagccattccttcagctcttcagcagaagaataattcagcttttgatccagttccatcagctgctgtttcgcctgatatgtttgtgagtctgttaagtcgcgtttctttgctccgctcacaacagacagcacaccattctctattttaacaaaaccgagatcaaaaaacacctttgtcatgaaattgattgtttcaacggaccagcctttatgttttgcaagctctgaaccgtgttttttcacgtcaaaagcgcctcttttcagcaagaacgcataataccatttaaagtggtctcttgcgggaaaagttgataaaaagtggtcctcatgattgagaaaaataaaatatatccgctcgggcgcctttccttccagcaaacgtgcgagcatgtccagcgaaggcggcggatccagtaatacaatatatgcaccatcgaggtcaaacgcctttgcttgatctttagaactgatgacgtgcacttctcggcgaaggtcttcagtttgaagtaatgttgttgagtcttctttgaaagagacaatggcccgtttagcagatggaagggcggaaactgtgtcttcccacgtccgttttccccttaaatcaaacagctgccattcagaaacagcggcatcctttatcataagctgcggcttttttcgattgttccattcgttgattgacatctcaccgacaatagaaattcttgaacccggtacgatgccttcttcaagctcgcctttattaaaaccgacgcaatcaagctgggacgactcgtttctgatcgtcattttgacatgagttttatttgcccctatcttgcggacatcttccagtactgcgttttctacgagaacgtgcggtttcgggttcagcatgccaaaaggagacagcatgttcatttctgcgatgctttcaactgtaatgtcttcgacgccgcagacaaggtcgacttcctgtacgggaataaaatcctcttccgtaagcgtattgtccgctatttcattcagcctgcttcgcaaatccggcacatcttcggctttcagcgtcatccccgcagccattggatggccgccgaaatgaggaagaatatctctgcattcagaaaggctctcaaataaattaaatcctctgatgcttcgggccgaacctttagcgattcccttttcttcatcaataccaagaacaatggccggtcggtagaaacggtccacaagctttgaagccacaatcccgacgactcccgggttccatccggctttggccacgacaattgcagtttgatcgagcccttgctgttcaaccatgtcaatcgcttcatccgtcattttgctgaccattttttggcgctctttgttcagctggtcaatttctgcggcaagctcttccgcttcaaacgaatcctctgacataagcaaatgaacagcgggatccgcctgttcgattcttccgacggcattcagccttggtgcgagctgaaatccgactgtttcttcgttcgcttctccgatgtctccgcctgacagcttaatcagctcttttaagccgagccgatttgtccgtcgaagcctttcaagtcctagtgttgctattaatctgttttcgtcatgcagcgggactagatcggcaatggtgccgatagccgccaggtcaagcagttcatcaggaagttcacccaataaagcgtgggcaagcttaaacgcgactccaaccccggcaagctctttaaacgggtaagtgcagccaggctgcttcgggtggacgatcgcacggacatccggaagctccggtcccggttcatgatgatcggtaatgatgacatccagtccgagttcctttgccaccttcgcttcatgcacagcggcaattcctgtatcaaccgtaatgatcaaagagaagccccgttctttaattgaacgaaacgcctgttcattaggtccatatccttctttaaaacggtcaggtatataaaaatcaacttgagccgacagtttttgcagcgtgtgaagcatcactgacgtacttgtaaccccatcggcgtcataatcgccatatatcataatcttttcttgttgtgaaatcgcctgttttattcgatctgccgcttctttcatgcctttcatttcaaaaggatcataaaaatcggcatcctttgtatgtaaaaacagcctagcgctttctgccgtatcaaagcctctttttacaagcagggacgcaacaagaggtgttatatgcaattgttctgtgagtgatttgaccttatcctgatctggtcgctggatttcccatcgcatttttgacgctaacataaattcacccctcaaccaccctattatactagagcaggctgaggggtttcaaataatattcgaaaactagtcttttttctcaatcatggctgatgcatcctgtgtgtcagtctgatcagcaagatgagtatcctcttgtttatgtattgctgttctattttctttccgcaaggtttttatttcccgcttcaatttcattacctgaaaaatgccgacagaaaatacgatcagtgctcccattaaaactgagcccaaaataacaagaatgagcggccattctgatcttccaaacaggtaatcaacttctacggatcgaacattaatgactgcgaaaatagcgacaattaaggtgaaaataagtgcgaaaataatggtccattgtttattcattctcttttcccccaaacttcttattgaggtaactttccccatcaagactggttttaaacatggcttaacactaggttaagctccctttgctgttaatttttcccggatcagcctcttcagtccggttccctcaccggaaatcacaagtgtatcgccttcgtcaatgactgtttcagagctcggattcagttgtttatcctgattctttttaacaattgcaatgaccgtcacatgatattcctgacccacattcaaatcaccaatcgtctgatgaatggcaggcgctcccgcctctgctttacaccactctataatcaaatcatcaagggctgactcgacctgttctaatgctttcggtttatatgccattccgccaagaattgcagacatttgccttgcttcagcgtcatcaaactgcacggaggcaacacattcctcatggtcgttttcgtcaaaatagtaaagctctctccgtccgtcatgatgaatgataattgaaattttatcacggtttctagtaatcatttcaactttttgtcctatgcccggcagctctgattcgcgaaccctcatatataaaccctcctacatatctgaaaaccagccataaacacttttaacaccatatatatgtttaaatgtaagcgtatgtcattatagcaaatgtctattttaagttcaatgaaacttcaaaaaacaggctgccctgcagaggacagcctgatattttttattgcgccgaatcttttttcagttctcttcctttccatgcaagccaaatttgtgcggcaatgtatagagaagaataaacgcctgttaacagcccgaccaataaagcaattgagaagttagtaatagaagatgctccaaagatcagcaatgtcacaacaacaatcacaacggttaatacagtgttaattgaacgtgtaaaggtttgctgcaggctcaggtttactatatggttcagatcggcaaatgttttcggcttacgctttttcatatgctcgcggaccctgtcaaatgtaacgattgtatcgttaatggaatacccgattatcgtcaagatggccgcgatgaacgtaacatctacttcaagccttgtaatactgaagaatgtgacgataaagaatgcgtcatatagcaatgaagcaatggcagcaatcgccattttgtattcgaatcggattgaaacgtaaataatgatgccaatagaagctatagcaactgcgtacagcgcatttcttgccagctccttaccgactgtcggtgaaactgtgctgacatttggctcagacccgtatttgtctttaaaatacgtttttacttttgctatggtttctttatctggcaccccgacaaaacgggcaacaccgatattgctcttttcgcctgacagaactacagtatcagggtccatacccagagattcaaaatccttctcaacttgctctgtcgtcagcttatggtcgctttgtacttcaatccgtgcaccgcttgcaaagtcaatgccaagattcagcctgaacacaagcaggataataatcccggcaaccgtgaccgcactggagaaaataaagaagtatttgcgtttgctcgtgaaatcccatttttggaatggcgtatgcggctctgtattttcatccgtatcctgaatatccatgatatgtttcttattgacaccaaaccagccttttttccgatcaagccatctgctttccacaaggagagcgaggagaaatctcgataagaaaacggcagtgataaagcttgtcaaaatcgataggatcagcattgtcgcaaaccctttaacagagcttgtcccaaagataaagagcacaaccgctgcaataatggttgtaatattcgcgtcaaaaatcgtcgcaaatgaccgtctgtttcctgaacggaaggcagagcggactgactttcctagcttgagctcttctttaatccgctcataggtaataatgttggcgtcaacagccatcccgacacctaaaatgagagcggcaattcccggaagcgtgagtacggcattcatccagtcaaagatctggagtgtaatgtagatataaacagacagcgtaatcaccgcgattaatcccggcagacggtaatagaaaagcataaataagaaaataattgcgataccgacaataccggcaaacaccgtatcatggagagcctgctggccgaattgtgcgcctactgatgtcgaatatttttcagtcagtttcacaggaagtgcgcctgcatttaaaatgctggctaaatcttttgcttcttgaaccgtaaattgcccttcaattgtaacatcagttgtgtttaattcctggcttacatttggggcggatacatatttagggtgctctttttgaacctcttttttaaaggagtcccctttttcgtaatccatccaaataacaagctggttgtttggcgccattttcatgacctttttggtcacttcgccgaatttatcagcatctttcagtttaatgctgacaatcggttcatttgttttggcgtcatacgtttgtttagctccgttttcgacgaggtcagagccattcagcaattctttgtcattcgtatctctgaaagaaagctgcgcttcagtcgccaaaatttcacgcgctctgttttggtttgtcacaccagcgagctgaacgcgaatccggttattcccttcaatttggatgttcggttcgctgacaccgagaacattggcccggcggttcaatgcctctactgtgctgaccagaacgtcttttgtgattttgtcacctttttttacaggctgtacatcatacagcacctcaaatccgccttgcaaatccaatcctaacgtaatattgttagcggcaggcttcgtaaagtagcccaagcccgtgccaatcaatagaacgaaaaggaaaaacgcaatcaagcgtccttttttcattatgtatatcctcccttaaacctgtgcgaatcaacctgctatctcagcagttcttccaatgcttcctggccctcttcactgcccagccaattagacgttttaaatgactcaacggttgcatagttcataaattcgccaattttcactgataaaatatcactcgccagttcataaatgttcagttccgttttctttttccacttcttatctgttaagtatgaccacaaactttcgagttcaacatcatcatacccgagaatcttaaactcttccagtttgctgtaaagaaacggcctgacgtggtctttatatagatcggctggatgcttctccacgaattccacgctccttttttattgtttttcaagaagacttgtcatgcttggacgatatatacgcatatctttattgtatatgattccaggtagtttgagaaggcagggggtaaaaatggcgaaacagacgtttttaaagggcactcttatccttatcgcagcaggaatggttacaagaatgctcgggtttgtcaaccgggtggttatcgcccgttttatcggtgaagaaggagtcgggctttacatgatggcggcgcctaccttcttcttggccactacattaactcaattcggtctgccggtcgcgatcagcaagctagtcgctgaagccagtgcgcgcggagatcatcaaaaaacgaaaaatattttagtcatgtctctgaccatcacgggagtgctcagcctcatctttacaccgctgtttctgtttttcgccccggttatggctgaaacgatgctgacagataagcgaacactgtatccgctcttggccattacgccggttgtgccgattattgctatatcgagtgtgctgaggggatactttcaaggaaaacagaatatgaacccgcttgctatgtcacaagtccttgaacaggttgtccgcatttcactcgtggctgtctgcacaacgatttttctcccttacggaattgaatatgctgcagcgggggcaatgctatcctcagtggcaggggagctggcatcacttctttatttattcgtttgctttaagtataaaaagacaattaaaatcagaaagcattttttccagtcaattaaaaacggaaaacaaacctttacccaattaatgagcgtgtcccttccaacaaccgggagccgctttatcggaaacctctcttggtttttcgagccaatcgtcgtcgctcaaagccttgccatcgccggtgtggcaacagttgccgcaacaaagcaatacggggaactgaccggctttgccatgacgttgctgactctgcctagctttattacatattctttgtcgaccgcgcttgttcctgcgatcagtgaaggaatggagcagaaaaaattgcaggtggtggaataccgcttggaacaggcgatgcgtctctgtctgctcagcggaggcatttcagttgttattttatttgtatttgcggatgagctgatgagagtgatgtacggttcttcaggcgcagctgtatttataaaagtgatggccccgttttttctgctttattattttcaaggcccgcttcaagctgttctgcaggcgcttaatttggcaggagctgcgatgatgaacagcttaatcggagcgctagtcaaaacaggccttatttttgtccttgccacaaggccttctcttggcattatgggcgcggcattagccattgtgacaggcatggtgctcgtcacgctattgcacgcagcaaccgtaagcaaagtgctgccgatcagcatcaaaatcaaggagtacgcgctcagcttcgctgttattgtaatttgcggattcatcagctccgccatcaaacattatataagctttggagcatctgaggctgtcaatctagccggatggattgcggtgagcgccgccatttatatgatcctcctgctcgttttccgtttaattaaaaaagatgagcttcgccgcattcccattatcggacgtctgatcatccgataatagtcacgtgcggtacccatctttttcgtcaataaataattctccgtctgtaaacgagcaaaatgaaatatctgaagggtttgtgtatccgtgtttttgcaaactttcaagcagccattttctatctttactgattctggacaggttttctgtttgaatgaagccgtctataatgagcggcatttcgagctgccgatgctctccgctattttctttctttacaatagtcagtttgcccgacggctctaaaatggcaaatgatacgtcagctactctgtcgacgctattttctctgagttgaaccattaaatcatcaaaattatatcgctgtgatttcatggcttcttcgtcaatttttccatatttgataattatagtcggcttaccgtcaagaagctggcggacttttcggttttttaaagaaaagtatgccaaagtcacttgaatgatcattaatacaagcattggcaaaatggtatgaaatagatgatcgtctacgttttctatggctaaaacggcaatttcagccatcatgataaagacaacgagatctaaaatactaagctctccgatctcccgtttgcccatgaaacgaaaaatgaccaatatcacaaaatacaatacgactgtgcgaaacgcaatagtgagaagctcttccatcatgcacctccaactcattataggttgcaacaaaatgatcaatttatgtaagaaaaaccgattgcatttcacaaagcttttacgtctaattcaagggataagggaatacatttttacaaagacgagccatcagcatgtctgacggctttgtgcaaaaagaacagaagccttttaatacaggcagagaggagacaatcatggaggaaacgaaacaagttggaaaaggcattctttacggcttaatcgccatattttcagccatgctcctgacaagtttggcggtttcacttttattgaccgcaacctcgctggaagaatcatcatttaactggctgatcacagctatctcatttctctctttatttatcggcgggttcatttcaggcgggaaaggcaaggaaagaggctggatgattggcgcattgaccgccttaagtttttctctgattatcttattgtttcagtatttaggattcggaaagacatttacagcagaacagctgatcttccatctgggatttttaggggtgtgcatgctgggcgggattttcggcgtgaacatgaggggaaacaggtcttccacataaaaaagagcgggctcacttgcccgctcttttttgtttgctatgtatagctcctgctgttattcagcagcagaaacttctctgatcgcgcggcggtcgaacgtaagacgtgtgttatcaccagtcttaattacgactttgctttcgtcgatagagtcaacagtaccgtgcaatcccccgattgtcactactgaatcgccttttttcagttcctcttgcatttggcgtacagccttttgctgcttttgctgaggacgaatcagcaagaagtaaaggaccgcaaacattaaaataataggaaccaatgtacctaaagtgccagtcatcattttcacccctttctgtaagcctgttatgtttatttagaagcttttcgcatttggcttgttatagccgtaacgctcaaagaactcttctctgaaatcacccagacgatcctcgcgaatagcctgtcttacctgctccattaagtgtaacagaaaatgaaggttatggtaagttgttaatcgaaggccgaatgtttcattacagcgaatcaagtgcctaatgtacgcgcgagtgtagtttttacatgtatagcaatcacactcttcatcaatcggacggaagtctctttcaaatttcgcatttttcatattgagtcgtccttcagcagtaaacactgtgccgtttcttgcaatccgtgtaggcagcacacagtcaaacatatcgaccccgcggatcgctccgtcgatcagtgcatccggagaacctactcccatcagatatctcggtttatccttcggcaagagcggtgttgtaaattcgagtacacggttcatgacatccttcggttcacctacagacaatccgcctatagcatatcccggaaaatcaagcgaaatcaagtccttcgcactttgtgtccgcagatcttcatattctccgccttgtacaataccaaacagcccttgttcatcctgacgattgtgggcattcaggcagcgttccgcccagcggcttgtccgctcaactgacctcttcatgtagtcgtactccgccgggtatggcgggcattcatcaaacgccatcataatatcagagccgagtgcgttttggatctccatcgctttttccggagataaaaacagcttgtctccatttagatgattgcggaaatggacaccctcttcctctatattacgaaacttgcttaaagaaaagacctgaaaaccgcctgaatcggttaaaattgcgcggtcccagttcataaatttatggagcccgcccgcttctttgacaatgtcttggcccggacgaagccatagatgataagtattgctcaaaatgatgcctgcatccattgctttcagctcttcaggcgacattgttttgactgtcgccagtgtgccgaccggcataaaaaccggcgtttcaaaggagccgtgaggcgtatgcactttgcccagccgcgctcctgtttgtttgcattcttttataaattcatagcgtattggttgttcagccacttttgatgaggcctcctgttctcaaattatataatcagcatcgcgtctccgaagctgaagaaacggtattcctcttccactgcatggttataggcacgcagaatgttttctcttccagcaagcgcgctgaccagcataatcaatgacgatttcggcaaatggaagtttgtaatcattccgtcaatggctttaaattcatagcccggataaataaaaatagatgtccagccgcttgatgctttaaattgcccgtcatgttccccggcaatcgtctcaagcgtgcgtgtcgaggtcgtgccgacagaaatgatccgaccgccattttctcttactttgtttaaggctgcagccgtttcttctgacatttgataaaactctgcatgcatattatgctcttccacttcatcggcactcacagggcgaaacgttccaaggcctacgtgcagtgtgatgaactcaatttgcacgcctttgtctttcagctgctgtaagatttcttccgtgaagtgaaggccagctgtaggcgcagcagcagagccgatttcttttgaatacactgtctggtagcgctctttgtcatcaagctgttctttgatatatggagggagcggcatctctccaagggattcaagcacctcgtagaaaataccgtcatattgaaattccatctttctgccgccgtgctcaagctcttccgtgcagattgccttcaatcttccgtctccaaatgtgacaacagttccttttttcacccgtttcgccggtttggcaagtgtttcccatttatcaccggtttcctgtttcaacaaaagaagttccactttcgcgccggtatcctcttttgtgccgaataaccgcgcaggcagtacccgggtattgttcaggactagacaatcgccttcgttaaagaagctgataatgtgtttaaacgagctgtcagtaagctctcctgtatgtttatcgagcaccatcagccttgaagcatcacgctgctccaacggtacttgtgcaattaaacgttctggtagttcaaaatcaaataaatcgactttcatgatgatttcacctttattctagtcttttgttatttcattctgccaaaaagattaagcaaaattgataataccacacttataataatacaagtgacaaccgggaagaaaaacgtgacatttcctttttttacaaaaatatctcccggcatcttgccgacaaaatgcaaaactgctccgataataagcaaaacagcaccaagaatcataatgatcttaggaaattcagtcatatcggggagcctccatttggaaatgatgataaacggccggtgtcacgatccttccacgcggcgttctttgtataaatccaatttgcagcagatatggttcatatacgtcttcaatcgtatgcgattcctcgccgatggtagctgaaatcgtatcaaggcctactgggccgccgttgaatttttcgatcatgcccatcagcagcttatgatcaatatgatccaaaccgaggcggtcaacctgaagccgctccagcgcattctgagaaatgtcttccgtaatcctgctgtcacccagcacttgggcgaaatcgcgcacccttctcagcaggcggttcgccacgcggggcgtccctctcgatcttcttgcaatttcaagagccgacggtttatcaatctcaacctcgaatacatcagcggttcttgtgacaatatccgccagttcttcttgtgtatagtactcaaggcgagacatgacgccgaatctgtctcttaaaggagccgtcaaaagccccaccctcgtcgtggctcccaccagcgtaaaaggcggaaggtcgaggcgaaccgagcgggcagatgggcctttgccaatcacaatgtccaggcaaaagtcttccattgcaggataaagcacctcttcgatcgatctgtgcagcctatgtatttcatcaataaataatacatctcccggttccagcgccgttaatatagcagccaaatcaccaggcctttcaatcgcaggccctgatgtcgtccgcaattccactcccatttcattagcaacaatcgaagcaagcgttgtttttccgagtccgggcggcccgtacagaagaacatgatccagcgtctcctgtctcattttcgccgcatctataaacacgcgcaaattttcttttaccttatgctgcccgatatactgtgccagattttgcggcctcaggctttgctctatcactgattcatggttgtctgcttcacttgagacgagccgttcatccatgaacatcaccttactttaatagtttttgtaatgcttttttcacatattggtctgttgtcagcccaatttcttctttaaggtgaggaagcacctttttgatttctttttcagcatatccgagaaccctgagggcttcaagtgcttcttcaagagccgtttccgctgtttgcttttcaagcctttcttcatgattaaacagattttcaatcatttcaggcacaacatctgccagctttccttttaaatctagaataatctggcgtgcggttttttttcctactccaggaaacttgaccaaaaaagcttcatcttcattttcaattgcttgaatgaccgctccgggatcacccgagcccaagatggcaagtgctcctttcgggccaattccggtcacgtttaacagctttgtaaagagcgccttctcctctcttgttgaaaaaccgtaaagcgaaaaagcatcctctctgatatgatggtatgtaaaaatcgtttcctggcttctctccttatatataaagggattcggcgtgaaaatctgatagccgatgccgccgttctctatgacaatatattggggagatacataatcaatcgtccctttaacaaattcaatcacgcaaattcacctctttgactgttcttcattgtaccataaaaacagccaaagtcttatagaaaagttaacatacgttcgcttctctctcattctttcacgaaaaaaaagacatgaattcatgtcttcaatcagcggacgttacccgctgtatgtcttcatatgttcgatgacatcctcaaactccgcttttgtccgaaatggaatgcctttcagcagatttttttgcatatggctttccagcctttctaaatcaatttgaaaaaaagactgaattggttcggaagctggctcaggccgcccatgaaaagtggaaatcactccattatccgatacaccgatatacccgttgaccttgctgagcggagaaatatcgtccatttgcttccggaagagcacatatccctttttttgttccacaagcgtccatccggcataagctgcccaaaaatcatccatagaaaacactttttcatgcttatgctcaatgctgacatcgccgtccaaatacaccttttcaagctgcacatgcacctgcagcggctcatagtgctccacttccgcgccaagtgcgcgggaaggagctcctattaaaaatactgccgctgagcaaagaatgcccagcaaaagatacgccgtgctgaatcgtttcaccctctacacctctttgcacacgtttatgattagtttgaccaaagaggctactgcttaaccgttttatcaaaatttgtctgcacattttccctgacaaaccgttcctccgtatacacatctgtgctttgctcagaaattgtcaagaatcgcgtcagaaaggcactgaaaaaatacaatgccgcaaagatccaaatcacgccgcctgcaccgagcggcccaatgaaaagactcacgatgcccggcgcgataaacgcacataaaccagatcccaaattcaacactgacatggcagcacctttattatcaggtgcaagcgtcggcaaaagcgcgcttaatgggacgtaccctgctaaagccgcgccgtagcagcaggcgataatcatgagcacccaatactgatgcccgatcagctgaggcgtgtaatacagcgccagcgtaaaaataccgcatccgacaccgccaaaccacatgaccgtattgcgccagccaagtttatctccgactgcaccgaaaatgatattaaacacaatattcacaaaaaacagcgtcccccatatttgcagccattccgaaaccgaatacccgtatcgtgctaaataagtaggaagaaagatggcaaatccaaattgtcctatcgcattaatcgtcttgaccactccgccgatgcctaccttagggttttcaaacataattgtaaatgccttcgacaattctttccatttcggctgatcttgtttttgtatcggagtaaatttatctttgttaaaaaataaggcaagaattccgcctgccgccacaaacagtaaagcgctccaaagcgtattgatttctccaaaggccggaactgcatagctggaatagaacgggcccagcacgttaaggccgcacgtaaacataaaccaaaaccagccgacggctttgccgagaatattttgagaggtgctgtatgacacccatacgagaaaagagtatgcaaacagcggatatcccaagcctctaagagcatagctgcccaagagagccggataatacatatgaggaatcgcccagccgataaaagcggccgaaccgaggataaatgcaagcaatccgacagtcatcgtttttctcggcccccaagtttggacaaacgttcctgaaagccaagctgagatggtgacagcaatgccgtacatggtaaataacgatgcggattgctgcatactgagaccatgatcaacgagaaaaggagacagccagccttgttcgaggccgtctccaaccataaagatgacaacgccaatataaccccaaaccatgtgagaaggaattccgattttgttcaaaacatttcctttagcatgtactgtattcattttctccaccgcctacttaaagtatcaatggagtatatacccaagcttgctgaattgtaatcctgttagattaaaaagcgattttttcagtgtgctcaatgctgacaggcatgccaaaagcaagcgattgctgtgctgctctggcgatccttccggcctgtaaaccgtcattgccggtgcagggagtctcctggtttgtgccgatcgcttctgcaaaacggagaatctcctcctcatatgaatccttatagcgttcaaggaaaaagaaatgcggtttatccttcatcacaaaatcagctgttgacacctcaaccgttgtcggcctgctattatcagccgctgcagagcctttcgtcccgaaaacctcaacccgctggtcatatccgtacacagcttggcggctgttatcaatcacagccatggcaccgttttcaaaagtcagtgtaataacagctgtatcaatatcacccagctccgcaaaagaaggattcaccaaagctgcccctttggcatacacttccgtcacttcgcttcccataatatatctggccatatcaaaatcatggatcgacatatccataaacaatccgcctgacgtacggacataatctatattcggggttctgggtcccgggacgtgatttttaataaatgaggtgtaccgatttcaccattttcaacaatcgttttgattttcttaaaatgaggatcaaagcggcggttaaatccgacttgaagtgttacaccgtgtttccggacagccgcaagcgcttcactcgtttcgtccagagagaaactaacgggcttctcacaaaatatatgctttttcgcctcggctgcttctttgatcatctgtgcatgtacggctgtaggagagcaaataaaaatagcatcaatatcaggatcatgtaataaatcacgataatcagaggttatgtattcaatctgatgactgtcggcccagctttttatacggcttgcctgaatgtcagagactgcttttattttcatgtgaggaatccggcttatattttgaacatgaagtttgccgatgcggcctgcaccgataatccctgtcacaatctgttttgtcatggcttcttcccccttgatcattcacgaaagcgctttatttaaaattaatactatcccatttgtaagcgcttttcaagaatggaaattaaacgttctatgtctcttttatcacaattcatgcttataagtagccttcttcttcaagaccagatacactagaattaggctctttttcctgaacagtttatgattttcctataaacagctgcataaaatagagcaaagaaggtgaatgaaatgctgacaaaagcagaggcactggcccataccgtcatataccgcaagaacagcagatttgataaagtcaaagagaaatccgaggaattaacactaatcggcaagggaagaagcgcctatgtgtttgccttaacagaaggcggtcgaaaaatggcgctgaaagtattttttccggaatatcaagcgacagcagtcaaagaagcagcgatctatgaaaaattagccgggtccgcattctatcctgacatttacgaaactggcgattcatttattctcatggaatatattaaaggtgaaaccttttataactgtctgaagaaaggcattgcaatcagtgatgacatgattcagcaggttgaagaagcgctttctgacgcccgggcagccggactgaacccgtcagatattcatttgcggaatctgatattgacagaaaccggggcggtgcgggtgattgatgttgcgagatttgagcagacaaaaacatgcacgcagtgggacgacttaaaatccgcatatcatgcactctacaaaaaaccgatattccccaaaaagattccgggtttttggctggagatcatcgcatttttatataagaaagattggtttcaaaagcatttcgcacagcggaaaagaaaatattcttaaatcaaaaaggcagccgcacaagcggctgcctttatcatgtattttttactttctgacggcagaaatcagtttcatttgttcaggcgacagcttaattcgatagcctctcacagttaagtagaccgcttctgggtccttctcaccggaatgacaatacgttttttccatttctgtctcccctcaccctttattggctttatttcatcttatcattgctttattaaggtagttttaaagaaatgtaaagatcatatgaatccgatatatagtaaaatgagagaaaaaaagggagagagtcacattaagacacgcagcaacatcccgcttattatgtttgccctgctggtcttcttcggcggcgccatctattggatgttattttcactaaaaaacgttccgaaaggcaatctcgtccaatcggttgattcgccggacggcagctatacgttaaacacttatgtatccgaaaacatcttgagcttagatgcagccagaggtgaacttgtaaatgaaaaaacacttgtcaagagaacaatctactggaattacccggacagccgcccagcagtgacgtggatcaatcacaatacagtgaaaatcggcaatcagactttacatcttgatactgatgaaacgtatgattggcgaaaagatgatcattggatccgtgaaaaaccgccgcaggcgtcagtgaggtgatgaaacatgaataagatgaacggaacaaatgatgacaagcatttcaatcattttgtgattgctttatcctttatatacggtttgactgaactaggctatttgttgctgaaggattttataacaattgccataagtttgcctctgtagaaaaacgcagcgtagtcgatacgccgcgttttttctttttcccttcctcttcttattgttaattacaggtcatataatgtgacaaatcgattgtagaaatagttcgattagaccaaaatcctttttatacatgtattcgaatttgaagtgagggggaagcttgatggcagattttgttgctagtttgaatgcggtcttatggagtacgcccgtcatttatattttattgggaattggattcaccttttcaattatgacccgttttttacaagtccgacatttaaaagaaatgattgttcagatgttcaaaggcaagagctctgaagccggcgtttcatctttccaagcgttatcgattgcgctgtccggccgtgtgggcacaggaaacatcgcgggagtggcgacagcaattgcattcggcggacccggtgcagtgttctggatgtgggcgattgcctttatcggggcggcgagtgcctttgtagaatcaacgcttgctcaaatttacaaagtgaaacaagacggtcaatatcggggcggccctgcttattatatagaaaaaggcttaggcattaagtggtttgccgtcttatttgccgctgctgcccttattgcaatggcctttctaatgccgggcgtacagtccaactccattgcggctgggatccaaaatgcattcggcatctctcctttcgtcacagggtgtggtctggttttattattagggttcattatttttggcggcgtcaaacgaattgccaatgcggcgcaaatgattgttccatttatggccattggatatatcctgctgtctttgattattattgtcatgaatgtgtctgaattgcctgctgtgatctcattaatattcaaaagcgcctttgcattggattccgcttttggcggcttgatcggcatggcgatttcctggggcgttaaacgtggcatttattcaaacgaagccggccagggaacaggcccgcatccggcagctgctgcagaggtttctcatccggtcaagcagggactggttcaggcattttctgtttatattgacaccttgtttgtatgttccgctacagctttcatgatcttgtttaccggcatgtacaatacccaggctgcagatggttcctttatcgttcaccagcttaaaggcgtagaagcaggacctggtttcacacaagcggcaattgacagtgttcttcccggattcggtgcaggctttgttgccatcgctttattcttcttcgcttttacaacaattatggcgtactactacatcgcagaaacaaatatcgcctatttagcacgaggcagagaaagcaaatgggcgatgcttggcttaaaactgattattttagccgccacgttctatggtactgtgaaaacagcttcacttgcttgggcattaggggatgcagggcttggcattatggtatggctgaacgtcattgccattgtgctgcttgccaagccggcgctccttgctttaaaggattatgagcgccaaaagaagcagggcttagacccgatctttgatccaaaagcgctgggtatcaaaaacgctgatttctgggagaaagaatacactcatgaaagtgaacgtgtctcctgaacatactaaaaccggcccgatatgacctcgtgccggttttttatgaacgatagtttgtatacacttcttgaacatcatcgtcatcttcaaggacgtctattaatgtttccagcttctcaacagcctgatcatcggcttctgcataggtattgggaagcatggtcacctccgccgaagaaattggatatttcgattcgagggctgttttcacctcttcaaaatgctcaggctctgtgaaaacctcatataggttttcttcaattcgcagctcttctcctcctgcttcaagcacatcaagcatgagctcatcttcttctatttgccattcagtacggtctatcgtaatgaacccctttcgttcaaataaaaaggctacacatccgctttctcccagacttccgccatttttattaaaggctgtccgcacatttgacgccgttcggtttttattatctgttacgcattcaaccatgacggcaatccctgaagggccgtagccttcataggtgatttcttcatagctgcttccgtcttggcctcccgcagcttttttaatggcccgatctatattttcattcggcatattggcgccttttgctttttcgatgacaagacgcaatgctgaatttgcttctggatccgctccgccttctttcgctgccacatagatttcttttgccagcttcataaatattttcccgcgctttgcatcctgtgcattttttcttttttgaatgtttttccacttggaatggcctgccatgttttcaccttcttttacattttctatgtacactttaatgggaattgttcgctgatgcaaagaaaaaggctgccgaatatccttccggcagcccttccttcctagcggttgttcattttatgaagttttctgaacagccctttatctgttgatacttggacgtcacggccatttgcatagttgcgcgctgcttttacgacattatctctgtcagactttgtgaactctctgtggcttttgactgcgataactactcggtcatcggataccataacttgtgtgtcattgacgtttttcacttgtttcacacggttggcaatttttgcagccagtcttctgttttcttggttgtcatacccgttgttcgctgcattccgattcatgtttcggttattcgtgttgttatatgttccgtcagttgccaaaggaacacgatcgtcagcagtaacacggtcacggttatttacattcgtggtgtttcggttaccgtcgttctgatcctccattaattcagaaacaggaccatcgtggtcgattccgtctccctgtctatcggcgtcattttcatttgtataatatccgattggacgggtattgccgttattgcgcgtatcattcatagcattatcgtttgctccgcatgctgttaagccggctgtcattagaatcaggctagcgatcgtcatttttttacccaatggaaaaaccccccgtggacgaattgagcatgtttgctcgcttttatcatgtgcgtatggggggcatgttaagcgtgtcagttctctccatttggcagtgatcagcttgaaaataaaaaaaggaacgatttacatcgttccgaacaatcactcattttcttcttccggccggccaaacatttggtttacagaaggctggttcgtcattggcatagaaactcctgccgaatatgggtttggatttgggttagctgtgccatatggcatattagggcttccataagctcccattcccgaatggccaggcgcagagaaatatggctgatgatcaccgtcacagccgcagtcgtcatgatctttgtatggcatgtaaccatgagccgcagcaggctggtatgctcccattacttggggagtgccgtaataagggccatacggcatatgtccatacggagatccataagccggagatgcgtattgcggcgcaccgtatgaaccgtaatgtccgtgatggctgttttcatgatgctggttttcataacccgggtcatactgaggcgatacaaatcctggctggtatccatgcatcggatgcattggataagcttgtgccggatagtacggatagcataatcctgatcctggaagaattggcgaaacaggcaccggacacggtacgaaatgagccggataatgataataaggctgaacagccggcatcggcatattcggaactgtgtgatgaacgttttcctcttctacaccgcctacctctggcgcctttggcatattaggcatattcggataattagcattttccatattactcatagcctcctgttgtggaaattggtcttgcatatgatacatatgatccatatttccgtcatgatgtttttttggctcctccggtttaggaggcgaccaaggctggaaaagctgtttcatatcataataatcgttcacatcagcttcagggtacacattttcctgcaaattaggcatcggcgggacatacggcatggacttcttttctttcggctttgtgtcttctacatcgacaacggatttaggcttctctttcgcatatggatgttcttgcttcacactcccggccgcaggacttttgcccgcttttggctcttttctgaccgggactccttctgacggcacttttattttcattccaggcatgattaagtctggattgctaagctgtgtattgagttttttcacttcctcaacatcgactccgtacttttcagctattttccagagcgaatcgcctttttgaacgatatggattttcaacgttttcccctcctatgcaaaacgtgaacagttcagctgtgattacaatatgtttcttcacaacatatgcctgaacaaaagaagttatgagtaaaggaagggaaaatatttctgatctacgtgatcgaaagcattcgattcagggcaaggagtgcatcttcctgaatggcttttggcaccttgatgacgcctgaaggttctcctttttcaatttgttccagcgaccacaacaaatgcggcaaatcaattcggttcattgtcaggcaagggcacatgtcagggttgagtgattcgatttgtttatctggatgctcgtgaatgatccgcagaacaagattcatttctgtcccgattgcccacttgcttcccgccggagcctggttgattgtgtcgataatatatttcgttgatccgttatcatcgcttagtgtcacgacttcgtgtgaacattccgggtgcacaatgatctgaatgtcggggtctcgctctctcatatcatggatatttttagtggtgaatttctcgtgaacagagcaatgccctttccacaaaatcactttcacattcgtatgcccggattcagctactaattcatctttcatcggatcccacacagccatatcttcaagcgcaatgcccagatcataagccgtatttctccctaaatgctgatcaggcaaaaataaaattctttttttctgtgtaaacgcccattcaagcacttttttcgcattcgaagaagttacagttgctccgccatgctttccgacgaatgccttgatctccgcagtggagttcacataagttaaaggtatgatcgtatctccaaatatatgctgaagcttcttccatgccctattggtctgctgcatgtcagccatgtcagccatagaacatccagctctcatatctggcaggacgaccgtttgctgctcgcttgtcagcatatcggcggtttctgccataaagtgaacgccgcaaaatacgatataatccgcttctttgtttttttccgctacttgggccaattgcagggagtcgcctgtttggtcagcaaattgtatcacttcatccttttgataatgatggcctggtataaagagcctgctgccgaactttttcttaatggcggcaacgcgcgtttccatatcctttctcgatagttctttataactttcgggcatcatatcattcgattgtttgatcacatcaagaattgacataacggcattcctccacagattcatttgataacgtaacatccatgctgatatctaaacttttgacggaatgagtcagaaatcctaatgaaatataattcacacccgtccctttaaaagcaggcaaagattctaacgtaatcccgccagaggcttcagtttttatatgagccggtgtgagctttgcaaaatgacggaccgtatcaggcggacagttgtcaaacataataacatccgctccagctgcaattgcttcccgcagctgtccctccgtttcaatttccacctcgatatttaccatgtgccctgcggcctgacgggcttttttgcacgcctctaaaatagagccgcatgctgcgatatgattatctttaatcatgatgccgtcatacaaaccgaatcgatgattatacccgccgccggctctgacagcatatttctccagcattctgagccccggtgttgtttttctcgtgtcacaaattttaatctgttcatcatccagacaccgaacagcctctcttgtcattgtcgcaattcctgacagtctctgaataagatttaatacgacccgctctcctgaaaggagcgcagctgcgggaccgtgtaactcggcaatcacttcacctttatgcaacatgtccccatcttttttgtttaaaatgatttgaacattttcgtccaataacgaaaagccttcttttatgatcgctgctcctgcaaaaataccctctgactttgcaacaatctccgcttcacagctctgttctccaaaaatagactgcgatgtaagatcccctgtcccaatatcctcaagaaaaaagtgattcagtaattttttcagctgtaaatgattcattgttccaaatcccctcgttttttctgatcttcgttcctttttttgtatggacaatttgtcttccttgccagcccacctcagtatgaggaaaatcggttcggaagtgagcccctctgctttcctcccgcaaaagcgcagaaaacgtcatcagctttgcagtttgccatagatgagaaagttccatctgccgaattgtgatatccttcacatttacttcctgaaaaggcagcgtatgaagccagatgctaagctcaatcaaactgctttgttcccgcagaatagacatgtggcttgtcattttgctttgcagttcatgcacctctatatccggcacctcgtagaagacactggtttctagccctgattgatattgcctgttataagccggtttttggataatatgctctgctgccctttttccaaataccagcgcttccaataaagaattgcttgcaagccggtttgctccatgtaaaccggagcatgctgtctcgccaatcgcataaagccccggcactgtcgtttctccccagcgattaactgaaacacctcccattaagaaatgcattcccggagcaacaggaatttttccgctgtggatatcaatccctgctttttcacaaatagcggtgatagtagggaaacgcgtttcaaaatcagaaatcgcactgaagtctatataaacgcgatttccttttgccatttcttcgtgaataacccgtgagacaatatctcttggagccaggtcacctaaaggatgccgttcagccataatcctgcggccgttttcgtctactaaacatccgccttcccctctgacagcttctgaaacaagcccgtagaaaacaccatttttcacaagcagtgtcgggtgaaactgagtaaactccaaatccgttaattccgccccggcccggtaagccagagaaagaccgtcacctgtgacagtgagatcattcgtatggtgaagaaacaggtttccacagccgccggcagccagcacaacttcgtctgcgtgccttaccttgagccgccctttgctgtcttttgtcatgacgccgatacatcgtccgtcctctataagcaaatctgctgccatttcattctcgattaacttgattttgctgttgatccgtttgagcaaataatcgataagcagcctgcctgttgcgtctccgcctgcatgaaatatgcggttgtatgagtgggccccttctcttccaagacaaacaccgcctcgttcattgcggtcgaatggaaatccacgctccaataggctttgaaccatcatttttccatcatgtaatacgtctgctgcaatagctagattattatggccgcatcctgcgtataacgtatcctccagatgggcttcaatcgagtcatcttttgcataggccgcagcaatcccgccttgtgcatagacagaattgctgtttttgacgcttttttttgtgataacagtcacttcgtatgagggcgggaaagctgcagctaaggaaagtgccgccgcccctgaaccgatgactgcaatcgtctttttagacatatgccatcctcctgttgtttacacctgtcttgacacctatatttacacaaggataaaataaactcaagagttttttatggagaacggatggaggaagaccggatgatttatttagattatgcagcgacaacgcctatttgtgaggaagcccttactgtatatcagaagcttagtatggatatgtacggaaatgccagcagcctgcatgatgcaggaggaaaagcaaagcacatactggagtactgccgtgaaaaaatcgccaacatcattggcggagaagcaagcggcatctattttacaagcggcggcactgaatccaattttctggccattcaatcattgctaaacggcctgccaaaaacgaaaagacattttattacgactgccatggagcatcagtccattcataattgcgctgcttttttggaacagcagggatatgatgtaacagtcattgaaccgaatgaatacgggcttattaccgaggaaatattactagcccatatccggccggaaacaggccttgtatctattcagcatgcaaattctgaaaccgggatcattcagcccattcaccgcctgtcttcatacctgcacaataagggcattcttcttcattgcgacgctgttcaaacgtttggaaagatcccgatcaatacaaaaaatctgggagtagatgcactctcaatgtccagccataaaatccacggtccaaaaggagtaggggcggtctatatccgtccggatgtcccttggaaacccgtttatcctctgactactcacgaatacggattcagagccggcaccgtaaatgttcccgggatcggtgccttcactgccgctgcagaattgatcgtaagcgaaatggaaaaacagatatcccgcaatgaggcattaagaacttactttctagaccaaatccgtattcggtctctccctgtaacccttgcggcagacacttcgcaagcagaatgtcttccgcatattatagggtgtttttttcactcatttgaaggacaatatgttatgttagaatgtaatcggagtaatatttgcatttcaaccggcagcgcttgttctgcaggttaccacggtccgtctgaaacaatgaaagcattaagaaaaaccgaacaagaagctctgcaatttatccgcatctcttttggcaggcatacaacagctgaacagctggaacagttattacatacgtttacagtgctttgggaacaaaagaaaggagaatttgatattgaccgaagaattaaagctaatgggcgccaacaggcgtgaccagcttcttctgtggctgaaggaatctaaatcaccgctgacaggaggagaactcgcaaaaaaagcgaacgtttcaagacaggttattgtacaggatatatcgctcttgaaagcgaaaaatgtaccgattatcgccacaagccaaggatatgtatacatggatgcagccgctcagcagcaccagcaggcagaaagaatcatagcatgtctgcacggtcctgaacggacagaagaggaactgcagctcatcgtcgacgaaggcgttacagtaaaagacgtaaaaatcgagcatcccgtgtatggagatttaactgcagccatccaagtaggcacccggaaggaagttagccatttcattaaaaaaatcaattctacgaatgctgcctacttatcacagctgaccgacggcgtgcacctgcatacactgacagcacctgatgaacatcgcatcgatcaagcttgccaagccctcgaagaagccggcattttaattaaagactaaaaaaagccctctagagggcttttttataattggtaagactggtatgcacccaggagctttactttgcagccgagcgcttcaagctcctgcatggcccctggaatcaatacatcatcaaacgctttctcaatatcaataataaagaaataatggcctaatccggttttagtcggacgtgactcaatttttgacaagtttaaatttctccaagaaaatgcagacagcactctatgcagcgccccggactgatcatcctgcggcagcatgaccattaaggtcgttttgggcctagaactcaattttgaattcacttcaaaagatatgttttcatcaggagacaggataacaaatcttgtatgattgtccctataatcctgtatatcccgtttcacgatttttaattcgtatgtagaagctgccatatcattggcaatgaccccgatattcagctctggatggtcactgacaaactttgctgccgccccggtagaattggcgtattcatatggaacggaaggaaaatgtcgatggagaaatttatggcattgcgcaatcgcgtgtgaatgcgagtaaattctgtcgagctctttccatgcattctctcttgagggatgaacgagcaagtgctgatgaatcggcaacgtcatttcacccacgattggcaagggctgttcatgtattaaatagtctattgttagattaacagatccttctaaagcattttccaaaggaacaaaagcaaaatcaacttcgcctgcaacggctgcatctatacactccggaatggtgcggtaagcaacatgttcggcgccgttttgaaaacaagaactgactgctagatgtgtaaatgtagctgctggacctaaataaccgactttcatgacgattttctctcccttatgcacctgaacctaatatttcaaccttttctacaaaatcaaacttcctgagcttattcattaatgtatgaatgtcttcttccattgccgacgtactgatagacagtgtcacatttgctctgccttgaagcggaatggtctggtgaatggaaagaacgttgcttccagaatcagctaccgcctgaagaagctgagataacgcacctgacctatcctccaaatgaaagaaaagtgtgataatttgttcttttaccatggtgtagaatggaaaaacagcatccctgtatttataaaacgcacttctgcttaaatcgaccttttgaacggcatctgctactgaatctgctttttttcgatcaagcagctttttgacttctaatgtttttctcattgcatcgggcaatacatcttcacggacaagataaaatgtctcctctttcatttgcatcccccctttaaaatagagagcctggcaccaggctctcttttcagccaacattcattaatcaataaattcaaattcaaattccagaagcctgattatatctccatccttggctccgcgttctctgagtgcttcatcaacacccattccgcgcatctgtcttgcaaaccgtttaaccgattcatcacgtgagaaatcagtcatcttgaataaccgctcaaggctgtctcctgaaagcacaaatacaccgtctggatcgcgtgtaatgttaaatggcacttcttcattttccatcgtgtacatgacacggttttgtgtaagctcttcctcgtcatacagcgggaattccggtgtgttctcaagctgattggcaacctcaaacagaagctcacgcagaccttctcttgtcaccgcactgatcgggaataccggataatcatccgtcagcttttctttaaaggcttcgagattttccgcagcctccggcatgtccattttatttgcaacgataatttgcggacgctcagtgagacgcagattgtactcgctcagctcctggttaatcgtaagataatcctcatacggatcgcggccctctaagcccgacatgtcaatgacgtgaacaataaccctcgtccgttcaatatggcgcaaaaactggtggcccagtccgatgccttggtgtgcgccttcaatcagtcctggcaaatcagccatgacaaagctgcgtccgtcatccgtttcaaccatgccgagattcgggacaagcgttgtaaagtgatagtccgcaattttcggttttgcagatgagacaacagacagcaaagtcgattttcccacactcgggaacccgacaagcccgacatccgcaagcacttttaattcaagaacaatgtagcgttcttttcccggctcgccgttttctgaaagctgaggcgcgggattagccggtgtagcaaagcggctattccctcttccgcctcttccgcctcttgcaatgacagcccgctgtccgtgctctgttaaatcagcgatgacctgttttgtatcatcgtctgtcacaacggtgcccggcggaactttaataaccatatcatcagcatttcgtccgtgctggtttttggacatgccatgctcgccgcgaatcgctttaaagtgttttttgtatctaaaatccatcagggtgcggagaccttcatctacttcaaaaacgacgtctcctcccttacctccgtcaccgccggcagggccgcctttcggcacatatttttcacggcgaaacgcaaccataccgttgccgccgtcgccgccttttacatatactttgacctgatctacaaacataatgtcctccgttctaaaccgttaaaaactccgctagtccaacccaatctcaatcagacattcgtgactcgtgatttcaaaacgcatgatatcaacgtcctcatatccattctgccgaatatcatcaaaagcagatggatcggcaaaggcgccgtgaaaatcaaggtacagaatcagctgtctgtcaggatgatccgtttgaagcgaaaccgttaaatgattttcactctctctgctgactgcttgatcaaacagatgaaacagctttctcatcagtttcgccagcttttgatcataagccgacaaatccttaatttctccgagaacttcatattcaagcgtcatataatgggttttccaattaaacgtaagaaaatcaaacgccaaatgcggtgttttcaggtttgagagctttgattcgtgctttgcgtctataaccatttcttcaatcatttcaaagacgcggtcatacttctgcaagcttaagtttcctttaatcagctgcagcttattcatccaatcatgccgggaatggccaagcagatgaatcagttcgtttgttaatgccgtgtcgcttatattttcttcttgattttttgaaacatccttcattttcgcactcccaatcatttaatttcttatttaggagtctgtataagtgtgtattatgaattataacagagaaggctttgttagaaaaacaattgtttttcccagaaatatcatgttccttttttctggctttggttgatttgcagccaggcagaacattttatgtattactgcttggggaacatatccagtgggtttgagatgtttattctcattcttggcggggtctgctcgcacatactctgcatttcattctaggtgtttactccgcatattgcaaaaaaaactccagtcatcatcgaccggagttttttgaatcattattgagctacaggatatacgctcacttttttgcggtcacggccgaaacgttcgaatttaacagttccgtcgattttcgcaaatagagtgtcatctccgccgcggcccacgttttcacctgggtaaatttttgttccgcgttgacggtaaaggatagaaccgcctgttacgaattgaccgtcagcacgtttagcacctaaacgtttagcctcagagtcacgtccgttctttgtagaacctactccttttttagaagcgaaaaactgaagatctaatctaagcatgtagctcacctcctatattatgtttgtggtcacacgcaagttgtctttgtaatcccgttcgattgtctccagcgaaacaatcatgccttcaatcagcaactgagctttttggcgtgcctctggatcaagagattcagggaattcaaaataaaaataacccccgtcctcccctatatcaagaagcggctcgaagcccgcgagcacaatgaccgcgttaacggctccaaacacaacggctgtcactccggcacaaacaagatcttgtccatgttcagcaaaattcgcatggcccgtcatttcaaaagacaatatgcctttatcatgagacctcctgattgttgcctgaatcatgcttacgcgttgattttttcgatcgtcactttagtgtaaggctgacgatgaccttgttttttatgaacgtttttctttggtttgtatctgaaaacagtgatttttttcgcgcggccttgtttttcaactttagccgttactgttgcgccttcaactgtagggttgccgactttcacgttgtctccgccaacaaacaaaacgtcttcaaaagtaactgtttcacctgcttcagcagcaagtttttcgatgtaaacagtttggccttcttcaactttgatttgtttaccgcctgttttaatgattgcgtacattctctgcacctcctattagactaagactcgccagataccagggggctgtaaaagctcttaacacctgtactgagcggttgtagcaatggtgctacatccataacattaaaaaatataccaaaatacaagccgtttgtcaatcagttttagtagggcagaagcagttcctccatggaagaattcgtccgcttatcggcaaagtaagcgtgcagcacttcattctcgtcaagctggctgagcttttggcctgatttttctataataatcggatgcttacagccacgtttgaactcggccatcacatgatagactttatcctccgcctttactgtcagcggcagaagtttctcaagctccctgttttttccgtaatacctttcgaggagaaatctcacatggatatagtgcctttgccgatattcctcaaacaaggaaacagccagaaagacaaacaaaacccatgcgctgatctgcagaggaatcacgaataaaacccagcacccgagcaacaggcagaagcagagcgacgtttttagattaagccggtgagccttttgaaaaggcagctgtttggaaaacaacaaaaataacagttttcctccatccagcggccagatcggcagtaaattgacaaataagatagaaagattataaaaggtgaagagttcaaaggtatgctgatgaatcactgagacttctgcaagcatccaggcggcaaactgaagccagatgtgctgaagagggccggcaataatgaccgcaaactcttcctttaacggccgattcccgtgttcttccacttcgaccgttcccccaaacggcagcaaaaaaacacgcttgattctccaagaaaaaaatacggccagagcagcatgccccagctcatgaatcaatacaatcaggagcagacataataatgctttcatatggcctgtgagcaagcccagcgccgcgataatccaaagaaaaggatgcacatggatctttaagataaggtcgagccatttattcaaatgtaatcacctgaatcggatcaataaatttatcgccgtctttcatggcaaaataatagacccctttattatgatcatcaagcttaatcgaaccgagctttttgcctttatccacaaaatcatataaagcaacatccacatctttgagctcgccatagatactataggtgttgtcagcatgctgcaccttaaccgtcagtcccgtctggctgtctttgctgacttcaaccacatagccttcttttacactatcaatcttatcgctgcttgtttcgactttaattccttccccattgtcctgaaaatcctgctgtactttcccggatgcaggcgcgatcagatctttgcctacttcaatctgctgttccttatttttgtgttcaggagccaggaaagcaagcggatttccgaatttggtttcgaaccaatggcttgctgaagcaaattgaaattcagtttcaaaggttttggctacggcgggtttaatctgactgacgggtccaatgtttgttttataggctatagctgaaacgagaacaaggcaggccgacagaagacatttcaggataattgaatctgttttcaccaatgggtgttttccgttgaatgttggcatgttatcttcgtagaccggaagtgttccatgcttttcctgatccgttaccatcacccaggacgggggtttctgcttttcagaaactgtctgagtagagaaacgttttgagccggaaagctgctttcttcttttctctaatcgttttctgatttcatctgctctgtgactcattgccatcatcctttgcattcgttgggtttgtacatcatatgtcttgtccatggcaaatattcggtttagtcaggaacaaagcaggcaaaaacaaaaaaacctgacacagcatttgctttgtcagattcttctctttaattctatcacattaagatcttacgccgaaaaatgacttaatcttagccatcattcctttattttgctcttcaagcacctgtaaaggaacagattcacctaagatgcggcgggcaatattgcgatatgcaatagaagcgcgatttttcgggtccatcgcaatcggttcaccatggttggaagctttgatgacttcatcatcatcagccacgattcctagcaaatcgatcgacaaatgctgtacgatttcgtcgatatccatcgtgtcaccgtttttcatcaggtgatttctgattctgttaacaacgagccgcggcggttcaatattttcctcttgctccagcagccctataatacggtcagcatcacgaacagctgagatttcaggcgtagtgaccacaatcgctttatcagctccggaaacggcatttttgtacccttgctcgattccggcaggacagtctatgatgacatagtcaaattcctgtttgagctcttggaccatgtttttaatttgttcaggagcaacagctgtcttatcgctcgtttgagcagcgggcattaaatagagcagatcatcgaaacgtttgtcttttacgagcgcctgatgcattttgcatctgccctctacaacgtctaccagatcgtaaataattctattttcaagacccattacaacatcaaggttgcgcagtcctatatcagtatctactaagcatacgcgcttccctaaaatggctaaggcggtaccgaggttcgcagatgttgttgtcttacctactccgccttttcccgaagttattacgatagcctcacccaattcacattcctccctcaagccttgttagatcaggtcttaaatgagccaaatgttgaaggcgttcaatgaccatatttccgtctgtatctaaataagcacattccatttcgttccctttttgaatgtggtctggggagcgatttaacacatgattgattcttaattgtgtcggaagcatttcagaggcggcgatgaccgcttgattatttccattaaacccggcatgcgcgattcctttcagtgagcccagaacaaaaatgttccctccggccctgactgttccgccgggattcacgtcaccgatcaggagcaagtcgccttttacctgcagcacttggcctgaacggacaatttttgaaacagaaataatttcggcttcctctcttatctgctgtgcttcttttttagtaatgacttcactgtcaatagaatgaacaaacaaatctttctttgacgcaatcaattcggttagctgttcctcttgctccttatataaaaagcgatttcccagcttaacatgaacgctgattttctggccttttccatcggtatattgttcaattgacagcatattctgaagaccatcgagaagctcatcaaaagaacacgcatcatccagatgcaatgttagtccattctttgttccttttattgttacatattgctgctttttggtcttcacaatattcacctcaacaacatactcatttcgtcaaaaaaagataaaatcctttttactcatctctcaattctttctttagactcataaaaaacaatctaaatggcagaacaagaataagagctgctgcaatatttaataaaattgtcggtataaaccggtcaagcacaaatccgttaaacgtcataatatctttatgaatcaaagactgaatgccgaatacgtaaaattcgagcagacagacagccagaactgctatcaatatcactacaaatgcgtttgtatgtaacactttaaacgcttttgaagccaaatagcatagccctgcaaaaccaaacatgtaaacgcctaatagacttgtatagttcatgtcatatagaaaaccaaaaataaatccgtaaatcatcgcgtgtttttggttgataaaagccgacatgaatatcaatacaagcatcaaaaaacgcggggcgagcacttggtcatctgtaacgaaaggaaaatgcaccaaatctgtaaaaatgctttccgcagaaaaaacaagcatcataacgaaagggagaaggaaacgtttcacgatccttcctcctctgtatcgacagtcggcacgtcacggttaacaacgatcacattatttaaatctgtaaggtcagccgcaggttttacataagcaacctttgtcagtccataggaatctgactcgatatcagtcacttcaccgattgtcagcccttctgggaaaacaccgcctgtccctgatgtttcaataagatcgccttttttcacgtcttgtttatccttacgctcaataattgtcatcttaagacgttttttctctttgtcatatccttcgatcaagccgtagcctttgctgcctttttttccggaaatttttgtcgcgactctgttattgcggtcagtatcgcttaaaagctgaacagcagacgtaaaattgttaagtccggagcttttgatcttgccgattaatgcgcctttttcgtttgtaacggccatatctttcgctacgttttgctgagtccccttgttaatggtgacctgtttggcccaattatcagggcttctggcgatgaccgttgctaaaatcggcttgtaatctttaatcgatttgacatggccaagctcgtcacgcaaggatttgttttcttcttcaagctcttgaagcttggcttcatattgtgtctgtccgtcaagtttttctcttagacgctcgttttctttgtatgtgttttttaaatcattgatgttctcaaatattcctgcaaaaaattcggcaggcgtatgaaaaatattttgaaatactcccgtcgtatcgccgatcactttctcaggccaggtggtattgcggccgcccttcagcgaaaatccaatcatagccaccaatatgataatacacagaagtaatagcattaaccgcttattcggcatcgtgttacacctcttctattgaactcccgattatctagttttccctttgaaaagatggatgtgctccagtgctttccctgttccgatcgctacacaatcaagcgggtcttcggcgataaggaccggcatttttgtttcttcgctgatgactttgtctaaattgcgcaaaagcgctccgccgccggttaacactatacctctgtccatgatatctgctgcaagctcaggcggtgttttttcgagtgtgctcttcactgcttcgacaattgtagatacagtgtcgcgtagagcattagaaatctcttttcctgtaatttcaattgttttcggcagacctgtgagcaaatcgcgtccgcggatttccatgttgtcggattcttcaggagcttctgcagatccgatttccattttaatcgcttcagccgtacggtcaccgatcatcaggttgtacgtttttctgatgtagttgataattgcgtcgtccatctcatcaccggctacacggattgactgagacgttacgatgcctccgagggaaataatcgcaacttctgtcgtaccgcccccgatatcaacaaccatgcttccagtcggttcccaaactggcagattggctccgattgctgcggcaaaaggctcttcaatcggatacgcgtcacgcgctcccgcctgtcttgtcgcatcgataacagcgcgttcttcaacagctgtaatgcctgatgggacacataccattacatatggttttctggcaaacatgcctttattttttatggcttgattgatgtaatatttcatcatcgtcgccgttgtttcataatcagcgataacgccgtctttcatcgggcgaagagccaccacgttgcccggtgtccgtccaatcatatttttcgcatcatttccgacagcgacaatcgatttcgtatccgtctgcaaagcgacaactgacggctctctcacaacaattccttttccttttacaaaaacaagcgtattcgcagttccaagatctataccaaggtctctagcaccaattccaaacatatgtatgtatcttcctttcttaaagcaaaaataccctaaagggaaaaactcataaactctattatagcttaattcgacgaaaaaaaaagtgttacaaatatcctttttcctttaaactcacaaattttttatccccgatcaccaaatggtcaagcagctcgatgccaatcaggtttccgcattcaaacagccgtcttgtcacttcaatatcctccctgctcggcgtcggatctccagaaggatgattatgaacacagataaaggaagcggcagatcgtttaaacgcttctttaaacacctctcgcgggtggacaatagatgaattcaggcttccgataaatacggtgcgtttatggatgacttgattttttgtatttaagtataaacagacaaaatgctcctgggttaaaaagcgcatatcctccatgacgagattagcgccgtcttccggggagcgaataacgaaatgttcttcgttggctaatttgtgaatccggcttccaagctcaactgcagccagtatttgaatcgcttttaccataccgattcccgggatgcttgacagctcttcaaccgatgcttccttgagcagacgcagcccgtcaaatgagcgcagcagccggtttgacaggtccaaaacagattcgtgtttagtccctgtccgcaataatatagccaaaagttcatgattcgctaagttctcggctccgactttcaggagccgttcccttggcttttctttcattgggaaatctttgagttttaatggcagatcgcgtatgaccaagcactccttttctttcccttcccgtttatagaaccgtcatgcccttatatcaaaatggcgaagagctctcattgtttttgatataggaaggcccatgactgaataataatctccgtctattttctttacaaaaagcgcgcctcttccttggatgccgtatgcacctgctttatccatcggctcttttgtttcaatatatgtccaaatctcttcttcactgagggaccaaaacgcaacttctgtcttatcataaaaagtctcgctgtgattttcagcttgaatgctgaccgcggttattactgagtgacttcggcctgaaagcctccgcagcatagaagcagcttcttcttgatcctgcggtttgccaagacattcgccgtcaaggcataccattgtatcagcaccgataacgattgcatgcgggtggagatcagctacagccttagctttttgttttgccaaccattggacgttttcttctggtgaaaagtttcgatttaatttttcttctacttcactgacaataatggagtagggcagctgtagaagatcgaggagttctttcctgcgcggagattgtgatgccagtattagcggttttgtcatgttcgtcatcctttcagggtttgcttaagaaaaaaagatactcgtttatcctaccaaatcacgaggcttgtcacaatttcagaaaaataactttttcatgacaaaataaaaaaagcctgtcactaaaggacgaaggctcagggcactatctcttattttacgacggctaacagctcctgctgagccttccacccggcttcagcacttggatcctctaattcctttaaagcctgcaaaatcgcttttttctctcctgtttctgacgcttttgtttcaccaagcgacttttctattttctctacactcgcttttgtaatgtcttcgccgagaatcgcctttgctgcaagctccgctgtttccttaaaagaatctgtcatatctgactctattgataaggaaagctccttgcctccccaggcttcaaaatcactgtcgattaaaacctgtcctaactgctgtgagacatccttatcactggctaagcccgcgatgacatacgtatacccgtcatcctttgacagtgacacggcggaatatcctttttcggtcaattgttctgttaacgtttcggcgcccttttcatttgaaaattttccggcttgcacagcgtatgttttgtatgtaccttcagtttgtgcttgtttttctgcgtctgaggtttgtttatcagcagaagtatcccctgcttttgccgtttggctgcctagagaatcctctaaagaggccggtgctgacgcttctttattccccgatatgtttaacgcgaataaccctaatccagtgccaatgacagccgcgaaggcaatcgtcgcagccactctttttactggtttggcagtcccggtctttccttttgcataagactttgtttttttcttttgataaggaggaacaactttagggtcctctttaaacaccttgtccccctcggaatcccaattgaattcatcttcatcagggtgttcctgggatgccgcaacctcttgttctgcctgtcttttttcctcccaatttgaaaatgtcatgcttctatctgcctctgtatcaggtgtctcttgttcgtaaaccgtctcttcttttccattaatcgtcaccttgagggctttttctgcggctttactgttttttttattctttctttttttcaattccgcttcctcccttcatttgcttgaccgttcttgtcggcttttcatgctacacactttagcacaggcaaagaaaaaaagaacaagacttttgtcgccttgtccaaaaaacgttcgtcaaatttttcagcagtcagcccaatgccattttgatataaaaagaaatgatagagtcaccgtataaataggctaaaatgctccctgcggccatagcgggggcgaagggaagcggctgccttttagcgagtctaccagtcagaacagctgccgctccatataatgcacctatcaaaactgaaaagaaaaaggcagctgccagcattttcacaccaagcacaaagccaatcaccgcaaataatttaatatctcctccccctactcccccatgggtgattgcggcaattacagccagaaatagaaatccggctgccgcacctagcaggcctgcataccaggaatcaagcggagaaatcaatctcgcggccgccaaaaagggaagaaagaaaatcaatattcgatttggaatcagcataaaatgaatatctgtcactgcaacaataatgagaagagagataaacaccacagcgggaaacagttccagcgatgtgccaaagcgtattcctgcggcagcaaataaacacgctgtcacaagctctgctgcgggatacataaaagaaatcctatgcccgcagcttttacatttacctttttgaaataggaatgacaggatgggaattaattctgcaggagttaatgtccgccggcaaaacgggcatgatgaacggggcgcaataatagatagatgtaaggggatacggcacccggccgtatagtaaaaagaaccaaggatcagcccaaagataaaaagaatggatagcatagacaacacacctttactcattgagttctggtatggattgtagcaaaatggacatcctgagctccaattgggaatattcaattttacacataaaaaaacggcagaatcttttttttgattctgccgagccggatgcttttatttcaacctttttcgaatgtcagaaataaagtaaagagatccggtaatcagcacaatttcatttgagccctttttgctttctatgaatttgatcacatcgtctggatcttcactccagcttttattgctgatttcacttgcatcatagagatcttttgcaagagaagcacgcgggaaatcaaaagaagcaaaatgcatcgcatgagcaatggtttccagtcttttaatcatgttctgatacggtttgtcctttaacgcgctaaacaccacagaaatgcgtgaattggcgaaacgctgcttcatcgtttccgccagcttttcaacaccttcttcgttatgcgcaccgtctaaatataccggaggatgctcctgaacaagctctaaccgtcccggccaagcagccttcacaagcccgctccttaacgcttcgtcactgatatgggcgatattctccttattgagccactccgcagccaaaatggacaaagcagcattttgtctttgatgggtgccaatcagagatgtccgaatatcttcatagcatttctcttccgttttgaatgaaaactgttctcctgcaggcagagcctcttcattgaaaataacacatgcatcatgcaatgactggaacggcgcagcatgccgttcggcttcatggcggatgacctgtaaagcttccggctgggtaactgctgtaacgattggaataccttctttaataataccggccttttctcctgcaatttcttcaatggtgtttcccaaaatattcatatgatcgtgtccaatgcttgtaatcacagttaagagcggttcaaccacattagtagaatcgaatctaccgcccaaacctgtttcaaaaataacaaaatcgaccttatgaaattctgcaaaatataaaaatgcacaggccgtcataatttcaaattctgtcggctgtccgtattccgtttgatcaagggcttcaacgtgcggtttcatttgattgacgagtgctgtccattcctcatctgaaatcggtatcccgtttacgctgatccgttcattaaacgtaataatataaggcgatgtaaatgttccaaccgtatatccggcttcctgcagcatagaacggataaaagcgacagttgatcctttaccgtttgttcctgcgacgtggaacgctcggatttttttttcaggatgtcctaaccgcgccatcagctgtttcattcggccaagtccgggcttcaccccgaatttcagcctcccgtgaatccagctgcgcgcatcttgatatgcagtaaacaatgataatcccctcttttataagacaaggcggtttctctagaaaccgccccggcttttcattaacccttcagctcagccattcgtttttgaacagcgtcacgcttcgccacataatctttttctttttcacgttcttcatcaattacgtgtgcaggcgcttttttcataaatccttcatttccaagtttcttttggacacgctcaacttcttttgtcagtttatcaaattctttttgcagacgggcaatttcttcatcaatattgattaagccttcaagcggaagaataacctctgctcctgagacaacggccgtcatcgccttatcaacagcctcaatatcggtgccgattttaagcacactcggattcgtaaagcgttcaacatatgaacggttcgcttcgaggcgggctgctatttcgtctgtgcttgttttaatgtacagttcaacctgcttgctcattggcgtattgacttcactgcggatattgcgcacagaacggatcagctcaacaagaagcttcatgtcagctgccgcttcagtatcggtatgctccggcactactacaggccattgacttactgtaatcgattccccttggtgaggaaggtgctgccaaatttcctccgttaagaatggcataaacggatggagcagacgcatcgtttgatcaagtacgtaagcaaggatggaacgggtagttttcttagccgcttcgtcttctccataaagcggaagcttcgccatttcaatataccaatcacagaaatcatcccaaataaagttatataaatggcgtcctacttcaccaaattcatatcgatcagcaagctgggtcacgtgctcgatcgtttcatttaatcgcgttaaaatccacttgtcagcgactgacttttcgcctgagagatcaagctcatcgtacgtcataccatccatattcattaatgcaaaacgggaagcgttccaaattttattggcaaaattccaggtcgattccactttttcatagctgaagcgcagatcctggccaggagagcttccagtcgcaaggaaataacgcagagaatcggctccgtacttgtcaatcacatccatcgggtcgacaccgttgccaagagatttactcattttccggccttgctcgtcacggattaagccgtggattaaaacatctttgaacgggcgctcgcctgtaaattcaatgccttggaaaatcatgcgtgatacccagaagaaaatgatatcgtaccctgtcacgagaacatctgtcggatagtagcgtttaaagtcttcagcagttacatcaggccagcccattgtggagaaaggccatagcgcagaactgaaccatgtatccagtacgtctgtatcctgttcccaattttcgctgtcttccggcgcttcaagcccgacatatagctcgcctgtttctttatgataccaggcaggaatacgatggccccaccacaattgacgggagatacaccagtcgcggatgttttccatccagtgtaaatacgttttttcgaaacggtcaggcacaaagttgaccttttcttctttcttttgcagctcaatcgctgcatcagcaagcggctgcatgcgcacaaaccattgtgtagaaagataaggctccacaacagccccgcttcgttcactatggccgacagagtgcatatgatcctcgatcttgaagagaactcccgcctcctgtaaatctttcacgagctttttgcggcattcaaaacgatccataccttgatattggagcgcattttcattcatcgtgccatcttcattcatgacaaggatgcgttctaaattgtgtcggttgccaagctcgaagtcgttcggatcatgagcaggcgtaattttcacggcaccagacccaaattccatatcaacatagtcatcaccgacaatcggaatttcacgatttacaatcggcaggatcaccgtttttccgataaggtgtttatagcgctcgtcttcagggtgaacggcaacagctgtatcaccgagcattgtttcaggacgtgtcgtcgcaatttcaattgagcctgaaccgtcagcaagcggatagctcatatgatagaatgcgccttgaacatccttgtaaatcacctcaatgtcggatagggctgtttttgtcgctgggtcccagttaataatatattcgcctctgtagatcaggcctttttcataaagcttaacgaatacttctcttaccgctttgctcaagccttcatccagcgtaaaacgttcacgggaataatctaggccaagacctaatttcgcccactggctgcgaataaagtcagcatattcttccttccacttccacgtttcttcgaggaatttttcacggcctaaatcgtagcgggatttgccttcttcacgaagtttcgcctctactttagcctgtgtcgcgatgccggcgtggtccatgccaggaagccacagcacatcatagccctgcatacgtttcattcttgttacaatgtcttgcagcgttgtgtcccatgcgtggccaaggtgaagtcttcctgttacgtttggcggcgggatgacgacagagtatggctcttttgtctggtcactgcccgcttcaaaaaatttgccttttagccaaaaatcatatcggtctttttcaaccgctgccggatcatatttcgtcggcattgtttgttcattcgtttccatcataaccctccagcatgtttaaaaatggctgagaacgaaaaaagagctcttcatccctgtaaaaggacgaaaagctctttcgcggtaccaccttttttcatgaactctatcagttcatgcacttataacggataacgggtgtttcccgaatttctctactcttctttcaagaaattatgctcccgggcgaccttccaatcagacaacataagaagcctttcagcaaacggcttctctctctgcatgcgccttttttgtactcttcccgttctaagcaggtgtatttatcagctcattgtacattatttatgttctttattatagtaaaagtgtttttgattcgtcaatcatcttttccaaaaacaccgctttctatacagatgggcaggcacctattgcccaagtttacatatgatgcttgtaaatgcgtagaggaggatgcaccgtgaagaaacgtttcagctcttattcgctgccgccatgggtaaggcaaattcggcttgtatccgcacaagtgattattcccattacgatttttcaaggaatcagaaccattttctttccgacaacctttgatgttttgctgctcgcaatcctaatctttttagcttgcgcccttcatttagaatggatataaacaaacaagtccgcgccattaagacgtggactcgttttcagcctgaaattttttctcttgttcaatctgatgaattttcatcacaaacggctctatatttttcatttgccaataagcctttaataattgtgtacattcctctttttcatgctgtcgtttcccagtttgataaccgttcagcaccttgtacatggctgccggatatgccatatagctgagaaaaaggctgacttccgcttcacgcaaagggaatgatttcgtatatccataaaaccattcgacgcattccggacaagctttcggaaagcctctgaacatttttgtataaaagccgagcaggtcgttttgcggaggaccgacagatgctctttcgaagtttgtaaaatatccggtcccagcatcattatacagaaaatggtgtatagacaggctgccatggttcattacaacccttgaaacgtccttttcctttgcagactcataccagtcctccagccgttccagcgcaaagttcaccgcggaaatggtttctgaaaaataggttatggcctggagttcaaaaggagaaaggtaccattccttctccgctctatccacaaactgctcatagaaaattttatcttgttcccacttttttttcgtttgcccgtaataacgttcaatctcatcacgtctaacctttagttcctgcgcggttctctcgtgaagacgggctgtttctctaaataaataagcatgtttctgatcccgttcttcctcttggtcaaattggagccaaggcattaaatagtaggtatctccgtattgtatgcctgctgagaaaaactcaccgctatttgttctgtaaacgggaacgaatgaacgaaagcctttttcctcaatcgccaccatatgatctgtaaaatgcttgccgcgaccttctttcaattttttcagggcaaatatgccgtagtctgtatacactttccaaacaagaggactgacaggctcaataaattgagcagtcagtccgtattcctgaagaaccgattgggtatcttccatttcattcaccacattttccgatcacttacggtttacgcatggctatttttatattgaggaatatagagaatctgtcctgcttttaattcatcatccaatgctaaagaattcatcctgatcagctgctgggatgtaatttcataccgttcgcataaacgctcgatcgtatcttcctgctgcacaatacaaattttcattctcgaaaactcatccgcttcttttgtaaagagttttgttaaataaagagaattatcactttcctttgtttgaggttccttcgtttcagcagcaggagcaaccctaggaacagcatccgtttccttcctttcagtctcagaagattcaggcagctggaaggattgaaaaggtgtttcttccttaggctcttcaggtgatggtgtttttctcacttcaatttcgaagctctcttcctcttgttcttcctcctccagcagcttaggcgctgaataaaaagaatcctcctcttcttgttcagacaggaaggtacggtatgccggttcaggcaattcttcttgagatgcctcctccgagcttgttttttgattgaaatggaaatgtaaatcggctttgtcattctccacatatgcagctgaagctgtttctctgctatcttctatggagagagcagcctctgatacactctccaaagcttcatccgcttccgcctcttcttggcaaagcgcaggatcagcctgatccgattgagctgcttcttcattttgagcctcttggcgcagcgcatattcatgattaggagacactgttgtttcctctttttcctttgcaatcacagtctctgaatgaagctcagcttccaaagcaggcgattcttctgctccagcgtgttcacgaggctcagtctctgctggagagtctgcttcttcacgaacatccgctattgcagctgccggctctgccgtttctttttttgctttaacgatctcttgaatctctatttctgaaggatcaggttctggctcagattcttctgtttccgattcagcacgaacctccttttccgcagcaagctcttctgactcttcttcctctttcacatcttctctggcctctggatctgaagcaaccgattcaggcggctcagattctgctttttctgtctccagttcttcacggagccccgctttcgagataaaaagttctggcggttcggctggcggttcatgctgaagaactgcttcctctgccgatgatgcacccggttcttctactacactatgtgccggcggctctgaaagctcttcctccctgaatgccgcaggagcttcatataaaggtatctccggctctttgtcttgcgtatcgtccaaaagcccttcgatcgctaaatcagcttgaattgttaaaatgcgcgaatccgtcaattgatagtcaaatgcgtcaataaagacgaagacatcctgtaaatggctcactttatttttcggaatggtaatatccacaggaaaacagtgagtcagttccgcacttccatcctctctctttctgacttgttcaacaaaccgcttatctgtataaatctcttcggtatgtttgttttgatctatgttgtactcacctgtaagttcaagcgatcctatgattgatacataatcatttacttcctgaaccctaatatcaggatctaatgaaatagaaagcagttcagaaacttcctgtcctttttggaaacagatcgattcttctacagaaaattgcaatcgatgattttgtggcaagttcatatcctcctttcatctaatccttaaaattagatgtcactaaaggtgtatgtatgaactggagaaaatatgagtgggagagcacgaaaaaaccggcacaaggagtccttgataccggttttcactcttatctgcggctgatctcagcaaatactttctcagctgcctggattgtgttttcaatatcttcatcagtatgggccgttgagaggaaaagaccttcgaattgtgatggcggaaggaataccccttcatttgccatccctttataatagcttgcgaacagcttcaaatcagatgatttcgctgtttcataattgatgactggttcgtttgtaaagaagaaaccgatcatcgaacctgcacggttaaaggtatgcggaatgccatgagcctcggcggcttttgaaattccttcttccagcctgtcgccttttttgatgaaattcttgtaggaatcaggtgtcagctgtttcaatgtctctaagccagccgtcatcgcaagcgggttgcctgacaatgtaccagcttgatagatcgggccgcttggagcgatctgctccatgatttctgcctttccgccataagcgccgacaggaagtccgcccccgattacttttcctaaacaagtcagatcaggcgttacgccgaagtagccttgagcgcagttataatcgacccggaagccagtcatcacttcatcaaaaatcagcagggagccgtactgctcagtgatatcacgcagaccctgcaggaaaccttcttgcggcggaacaacacccatatttccggcaactggctctacaatgactcccgcaatgtcttcaccgaattgctggaaagcaagctttacactgtctaaatcattgtacggaacggtgatggtgtttttcgcaatgccttcaggcacccccgggctgtcaggcagaccgagagtggcaacacctgaaccagctttaatcaagagagaatcgccgtgtccgtggtagcagccctcaaattttaaaatcttgttgcggcccgtatagccccttgccaaacggagggcactcattgtagcctctgttccggagcttaccattcggacgatttctacagatggcacacgatcaatgacgagcttagcaagttcattttctacttcagtcggagcaccgaagcttgtcccgtattcagccactgttttgaggctttctacgacgcggtcatttgtatgccctaaaattaaaggcccccatgacaagacgtagtcaatatattcattcccgtcaatatcaaagattttcgagccttttccgcgctccataaaaatcgggtccatgtctaccgatttaaatgcgcgaacgggactgttcacaccgcccggcatgagtttttgcgcttctttaaaagccgtttttgatttttcatagcttctcatctgcctcaactcctgtcaactgaataaaattactccgcaagccatttcgctgcgtctttcgcatgatacgtaataatcaggtcggcacccgcgcgcttcatgcttgtcaaaatttccaacacaatttctttttctttgatccagccgttctgcgctgcagccttcaccattgaatactctccgcttacattataagcgacgagcggcaaagtaaactcattttttacgtcacgcatgatatccatataagaaagcgaaggtttgacaatcaaaaagtccgcgccttcctcgacatctgattgtgcttcgcggagtgcctccatacggttggcagggtccatctgatatgttttgcggtctccgaattgcggtgtgctgtttgctgcatcacggaacggaccgtaaaactcacttgaatatttaacagcgtaagacatgatgggaatattgacgaatccttctttatcaagtgcttctctgatcactgtaacaaatccgtccatcatgtttgatggcgcaatgatatccgcacctgctttcgcttggctgacagctgtctgcgccaaaagttccagcgattcatcattgaggatgaccccgtctttgacaagtccgcaatggccgtggtctgtatattcgcacaggcacgtgtcagcgacaacaaccatttcagggaagtgttctttaatttctgtgatggctttttggacaattccgtgatcatggtacgcttgtgttccgcaatcatctttttcttccgggatgccgaacacgataacagattgaatgcccagtttgaccagctccgctacttcatccttcaataaatctaatgatacatggtaaacatcaggcattgacggaacagcttttttgccttccagcccttcaacgacaaaaatcggataaataaaatctgatggatgcaaacgtgtttcctttaccatttctctcattgcttttgatgtccgcaggcggcgatgtctattaaatgattgactcatattctctcttcctctcttgacatgctgcacattaattcaagcatgccatctattgtaaatgtatcaggcgtatgcgatgtgatgccgtacgtcagaagggcatcatttgttaaaggcccaatgctgatacaggccgtcccattcgccttccacttttttaattcttctcccaagacatgcataaacgtatgtacggttgatgaactcgtaaatgttacatagtcaaaggaatattgacccgcagcgtctttcagtgcctcaatgccttcttcatccggaatcgtttcgtagagaacccattcctttacttcaaaaccgagcgggacaagctcttgttttatcacatcacgtgacaaattccctttcatcacggtaatgggctcccccggttcagcatgctgcttaagagcgtcagccaattgttcagcaatatactcctgtggcatcacatcaaccgatacgttatgcgtttttaaacggcgggcggttttttcaccgacggctgcaatttttttatgcgcagggagaataagctgattttccttcagataagaaaaaaagaagtctgccccgttcacacttgtaaaaacaagccagcctggcgcggcaagatcctctcttacctgttccgcaacatcattcggcaaagcgcggcgaaacgtaatcaaagaggttaaaaccgctttaccgccaagcgcctccactttttgctgaaatgatgttgcctgtgccttattccgggtaacaagcactgtttttcctttcaacggaaaatcattttccatcctcatcaagctcccgttttacacgatcaattaaatcttttgctcctttgtcagccataagagcggcacagcgctttcctacttcctccggatcgtttccggtgacggtttctttaaaaatgattttgccgtcaggtgaagcgacaagacctgtcatttcaatttcatcctgtccatttaacacggagtagcctgcgatcggaacctggcagccgccctccatcgcgtttaaaaaagcacgttccgctaagacagtccgttttgtatattcatctgtaaactgagaaaacaacgccaacagctcttcatccgattctcggcactcaatcgccagtgctccctgccccacagcaggcaaacagcgctcaggctcaaggaattcggttacgacatcttgcttccaacccattctagaaaggccggcagccgctaaaataattgcgtcataatcctctgtttccagcttttgaagtcttgtatctatattacctctaatccatttaattgtaaggtcagggcgctcaatcaaaagctgcgcgcttcttcttaaactgcttgtgccaacgacagcaccttccttcatttctgaaagctttacgcgattctttgaaataagggcatcacgcgggtcctcccgttcaggaatacagccgatcacaagaccttcaggcaaaacagcaggcatgtccttcatgctgtgcactgccatatcaatctcttcgtttaaaagcgcctgttcaatttctttgacaaacagcccttttccacccacttttgagagtgtaacatctacaatccggtcgccctttgtcacgatctctttaatttcaaaagcaaacgaaggattgatttccttcagtttttgaataacccattttgtttgagtcatagcgagtttgctccgtctggaacctactttaatcgttctcatcatttctttcctcccgaatctgcttgggacatcgtttaactgaaccaatggaattgcgacaggcttccaagcaggaaataattgatcatcagcaccagaaaacaagccgtattccacagtgctgcgacctttccttgcagctctttaatcagcctgatataaagataatagctgtacagcagcaggacgacaaacgaaccaagcactttggcgtcaaaccaatacagcgtttctagtgagacatacgcccaaatgacgccgagaatcaaactcagcagcagcatcggaaccccaatgacatttaaaacatacgccatataatcaagcttagataaatcttctattctcaacagccattttccccactttttctttttcagcagatgatattgaaacatatatagcacagaaaaaacgaaagaaagggaaaaagcgccgtatgaaagaatcgccattgtaatatgaatcaccaaaagctcggatacaagctgcccggaaaaagcagctgactgctgctctgtcggtgaaaatgtgtgaatggcgatcatagaaaatcctataacatttgtaaaaaacacgataaagtcaacacgtaaaagctttgtcagtacaagtgacagcgtgacaagcacccaggcataaaaataaagcgcctccgtcacatttaataccggaaaccgccccgtcacccacataaaataggccaaatacacggtttgcagagtccagacaatagaaagcaaccagaaggccatttttccagccttccggttgtgttgaagaaaatctataaaataaaagagtacacttaacgcgtaaatgacgattgtcccctcattaagtcttgccattgcagtatcaatcattcagctttcactcacttacaagtgggctaaagcccgcttttgattcagccttcttaaaagagtggaccttctggctgctttccacggttttcatcatttgacggcccgcagcttcttcaatatcaaaaatctgcataaacaacgcgagcttttcttcagaatcagcatctgccgcaagctctttcacctttaaaatcggatcacgaagcatttggttaataatacttttggtgtgtttgttcaacagttttttctctcttgtgcttaagtgaggcagcttacgctcaatgctgtccatcgtttctgactggatagcaagcgccttttcgcgcaatgcagaaataaccggcacaacaccaagtgtattcatccattgtttaaattccacaatggtttcttcaattaacagttcaactttttcagctgtttctctccgctctttcatgttcgcttctacaatgccttccagatcgtcgatatcataaagaaaaacaccttcaagatcattcagcgccggatcaagatctctaggcacggcaatgtcgaccataaacagcggacgtcccttgcgaagcttattcgcgttttccatcatctctttggacacgacaaattcacttgcaccggttgaactgattaaaatatcagcctccgcaagcgcgctttcaagctgattcaagcttctcgcttcacctgagaaacggtctgcaagctccttcgctttcaagtatgttcggttaatgacagtgaccttgccgattccctgtccgtgcaggttttccgcagcaagctcgcccatttttcccgcaccgagaatcaatatgtgcttgcttgaaagatttccgaagatttttttagcaagttcaactgcagcatagcttactgacaccgcatttgagccaatgtctgtttcggcgtgagtccgtttgcccactgtaaccgcctgcttaaacagctcattaaaaatagtcccgatcgttttttcttgctgagctgttttaaagctgtcgcgtacctgtccgagaatctgcgtttcgccaatcaccatagaatcaagtccgcaggctacacggaataaatgctcaacagcggcatcgctctcataaaacgttaagaacggtgacagctcttctttgcttaattgaaaccaatcagctaaaaacttttttatataataacggccggtatggagctggtcgactaccgcataaatttcagtgcggttgcaggttgagacaatgatgttttcaagaatgcttttctcttctttcagctgcaccattgcttctgccagctcattcggctgaaaacttactttttcacgtatctcaataggggcggatttataatctactcccacaacaagtatatgcatcgctctaattacacccccaacgcccaatcttaatttataatcattctaacatagaactcattatttataataattataacatagtttctttcacaaaatgtgaacagattttaaaattcttatgctatattagaaaaagcttcagggaaaagaagcattcctattgacaataccaaaaacagcagaaatttactacacatcagctctaaaaaacaagaaggtgatatgcatgaaacaaaaatcaattttattcccttgcctgctgcttgccgcttctgtatatgcatggcttgaaagcggccaagctgaactgttttcgggacaggatcaatggcctgttctcctcatgctgttaggagcagcctttgtatatcaaggaaaaaaagaagccgttgcaccccatttctttatcggtttgcttctcttcgggatcggtttacacttttttgccaagccgaaatgggtatggtggccggatgattttgaaatgcttctctttatgatcggcttctcactactcgtttcaaccgttcaaaaaaaagaatatgtatatgaagctgtgtcgatgatttgtttttccctgtttttgtactttttcaaacaaattatggcatggcttgagtctgcgcatattccaacagcgcttctgaaggagtattggccgtttgtctttattggaatcagtttattgttattattgataaaacgaaaaaaatctatacgataaataaaaccggtagaggatcctctaccggtttatcatttttttgatcgctccccaagcttcgtcttttccctttttcgtttctgaggaaaagagaatcagctcgtcttccggatcaatatttaatgtttgtcggacaaccttcgcgtgtttgtcccatttgcctttcgggatcttatccgcctttgtagcgataacaataacaggaatgccgtaatactttaagaattcatacatctgtacatcatcattagatggcgcatgccgcaaatcaacgatctgcaccacagcttttaattcctcgcgtgtcgtgatataggtttcaatcattctcccccatgcttcacgctcagactttgacactttggcaaaaccgtagcccggcacatccacaaaatgcaactcatcattgataatgtagaaattaagtgtttgtgtttttcccggctttgatgacgttctcgcaagatttttgcgattgattaatgaattgataaaagacgattttcctacgttcgatcttccggccaatgcgatttccggaagccccccttcagggtactgttccggttttactgcactgatcacgatttctgactttgtgactttcatttcttctctcctactaaggcatgttccaaaacctcgtctaagtgggacgccaatataaatgtcagcccctccctgacgctttccggaatatcctctatatctttttcattatctttaggcgcaataatggtcgttaatcccgctctatgtgcgccaagcgctttttcctttaagccgccgatcggcagcacgcgcccgcgaagcgtgatttccccagtcatgccgacttcacgcgaaaccgcccgtcccgttaaagcagaaacaagcgctgttgccatcgtaataccggctgacggaccatcttttggcaccgcaccctctggtacatgtatatgaatatcatacttctcatgaaagtcaggttcaatgccaagttcttctgttttggatcgcacatagctgaatgcagcctgagcagactctctcataacatctccgagctttcctgtcaggattaatttccctttccccggagaaagcgatacttcaatcgacagcgtatctccgccaacggttgtataagcaagccctgtcactacaccaacctgatcctctgtctcagcttgtccatatctgaaaatacgttttccgataaagtcttgaaggttcttctcagtaaccgtaatccgttttcgctcttcagcaacaatggcttttgcagctttacggcaaatcgcggcaagctggcgttcaaggcttctcacaccagcttctctcgtatagtagcggataatatcaagaatcgcctgatcacgcagctgcaggttgcttttcttcagcccgtgttctttgatttgctttggaagcaagtgatcctttacgatttcaagtttttctatttctgtgtagcctgcgatattaataatttccattctgtctctgagcgggcccgggattgtggccaaattgttcgccgttgcgataaacagcactttggataaatcaaaggtttcttcaatatagtgatcactgaagctgctgttttgctctggatcaagcacttcaagcatagcggatgatgggtctcctctaaaatcagatgacattttgtcaatttcgtctaataagaagaccggattcagcttgcccgcttttttcatcccttgaataatacgtccaggcattgctccgacataggtccgtctgtgtccgcgtatctctgattcatcccgtactcctccgagtgagattctgacgaatttgcgtcccaagctttttgcaattgatttggctaaagacgtttttccgacacctggaggtcctgccaaacagagaatcgggcctttcagggatttggtcagcttctggacagccaaatattctaaaatacgttcttttactttttcaagcccgtggtgctcttcgtccaagagacgtcctgcttctttcaaatcaagcttatcatctgtttcatccgtccacggaagagcaaccagccagtcgatatagttgcggatcacagagctttccgcagaacttgacggaattttttcatatctgttcaattctttaagcgctgtttctttcacatgatcaggcatgcctgcttcttcgattttttccgtcagcgtctgaacttcgccagttttgccttctttatcgccaagctctttttggatcgccttcatttgttcacgcaagtagtattccttctgcgtacgctccatcgaacgtttgacgcgctgaccgatttttttctcaatctccagcacttctttttcattattaataaaatcaatgaccttgttcagcctgtctttgacatcagccgtttctaaaatatcctgcttatcctttagtttaaggggcagatgagaagcaacgatgtctgccattctccccggctcttcgatatcagtaaccgcagcgtacgtttcggccgagatttttttagaaatttttatgtactgatcaaagtggtctagcaaagtccgcatcaatgcttcgtcttctgtatcttttgaatcatcttcatgaataagttgaatgtcaaccgacgtgtaatcctcgtgttcattgtatttgacgatatgggcgcgcttgaggccctccaccaacacacgaatcgtaccgttcggaagcttcagcatttgcttaatttttgtataggtgccgacagtgaaaatctcgtcttcaccaggttcgtctatcgaaatatcctgctgagtggctaaaaatatcatatgatcatgcatcattgcctgttcaagagcctgaaccgacttgtcacgtcctacatctaaatgcaaaaccatcgtcgggtacactaataaacctcttaaagggaggagcgggatgctgcgttttaattcttctgccatgtgactgacacctccgtgactttagtatgaaccattataatacaactttttcatccttgtacaataaacggcatggttccattttctataaaacagtctcctcgtagtataccctttctttctgatatgaaaaaggaaaagatgtccttcatgaaaaaaaccctattatcaaaatagggtttaaacggattctttattgatttcgatatgaaacggtttttgttccgttggcggattcaccaaaatttcatcaagcacttcttggaacgtcttcactgcaataatctcgatcccgtcaatctgctttaagatggcctgctgattttcatatgggataatcacctttttcgcaccggactgcttggccgcttttattttcggaatgacgcctccgatgggtttcacaagaccgttcaggctgatttcgcccgtcatcgcaacggtattgtcaataggaattttgtgtatcgccgagaaaatccccgccgccatcgcaatgcctgctgacggcccatcaatcggaatccctcctgggaaattgatgtgaatatcataatcagaaggcttcattcccattgtccggagcacggttaatacattttcaaccgaacccttcgccatgctttttcgcctgatcgattttgattggctgccgatgctttcttcttcagctattcctgtgatgttaattgatcctttatcttgagccgcggttacacttacttcgatttccagaagcgatccgctgttaggcccatagactgcaagcccatttacaatgccaacctgtggttcaacaccgattttttgctcgtgctttggagtaagctgactggagtgaatgacccattcaatatcctcaatcgtaatgtcctttcgattctccgttacagccatccccgctgcgatttgaatcatattgacggcttcccgcccgttccgcgtgtagctggtcaaaagatccagtccttcttcggagataattttttcaattttatccgctgctgttttggcaaccgttttcaactcgtccttttcaagctcgcggaaaaaaacctccaaacagcgggaccggatagctggcggaatttcgtttggcattctcgtggtcgcgccaatcaagcgaaaatcagccggcagcccattttgaaaaatatcatgaatatgattcggaatttgtgtattttcctcactgtaatacgcactatctaaaaagacttttctgtcctcaagcaccttcagcattttattcatttgaataggatgcagctcccctatttcatcaataaacagcacaccgccatgggcatgggtgacagctccctgcttcggctgcggaatcccagcctgtcccatcgctccggccccttggtatatcgggtcatggacagagccgatgagtggatcggcaattcctctttcatcaaaacgggctgttgtcgcatcgagttccacaaagacagcctgctctttaaacggtgattgtttatgtttttttgcttcttccaacacaagccgcgcagcagccgttttcccaactcccggtggcccatagacaatcacatgctgaggatttggcccgcataaagccgcctttaatgctttaatgccgtcttcctgtccgacgatatctttaaagcttttggggcggaccttctcagataatggctcggacaagctgatagcgcgcattttccgaagctgctccatttccttctttgattctttatctatcgtgaccttttgtgtcctttgatttttaagcaaattccaaaaatacaaaccgatgatgatcccaaaaaacagctgaataaataacgcgatccctgtccaactcatggtggtccctcctgaaaaacaatttatgtatccaattcattcctctgattgctagtatctcccatagaagacgggaataaacgtttttccggaagagttgcatgcaaaaaaacctcctgagtgttaccactcaggaggtttgtgcttatctttatgcagatgttttatcttggcttacctcagtgccgtcttttaataagaggcgaggaggctctccgtgtgtcacagttgccccggtgattacacatttttcaatgtcatcacgagaaggcagctcaaacatcacatcaagcatgatgccttcaatgatggaacggagtccgcgtgctccagtcttgcgttcaattgcttttttagcaatttcagaaagcgcttcttcttcaaactcaagctcaacgttgtcaagctcaagcattttcttgaattgcttaactagagcgtttttcggttttgttaagatcgcaaccaatgcttcttcgtcaagcttttcaaggcttgcaataaccggaagacgtccgataaattcaggaattaacccgaaacggagcaaatcttcaggaagcacttttgaaagaagatcttctttctcaagatcagcagctttattgtcggcaccgaatccaatcactttttggcctaaacggcgtttgatgatttgttcgataccatcgaaagctccgccgcaaatgaacaaaatatttgttgtgtcaatttgaatgaattcttgatgaggatgcttacgtcccccttgaggcggcacgcttgccactgtaccctcaagaattttaagcaatgcctgctgtacaccctcacctgacacatcacgtgtgatagacgggttttcagattttctagccactttatcgatttcatcaatatagataatgcctttttcggctttttccacatcataatcagcagcttggatgagcttcaagagaatattctctacatcttcacccacgtatccagcttcagtcaaagatgtagcgtctgcaattgcaaacggcacatttaaaatgcgagccaatgtttgcgccagaagggttttaccgcttcccgtagggccgattaatgaaatattactttttgagagctcaacatcatcaactttgctgttagagttaatgcgcttatagtggttatacacagcaacagcaagtgatttcttcgcttgatcttggccgatgacatattcattcaaaatttcgcgaatttcctgaggctttggtacgtctttaaattctacttcttcttctgttccgagttcttcctctacaatttcagtgcagagttcgatacattcgtcacatatatatacaccaggtccagctacaagcttacgaacctgatcttgtgtttttccacagaacgagcattttaattgtcctttttcctcgttaaatttaaacattctttcaccccttaatcttgtctcactttttcttttaccggcagagcaaaagaaaatgattcttgaaacgaacgagtatgtattgcattttaccatactttccaaaaagacggtaacaatgtgtttctgacttgcacattctatatgtatgacaaaaaacagccctgcattaactatattgccccaagaaaaagagataactcataattgtacaaaacaaggcacgaatgattcgcgccctgttttattagtactattattatgcaccatattaacggttttctacaagaaaatcaattgctttgcgaacttttaaatcttctttcatcgcgtcagtagaaccgatggcttgtttaatattttcaacaggcatgttgtatgcttcagccattttagtaagctcagcatcaacttcctcatctgatacttcaaggttttccgctttcgcaatcgcctcaagagtcaggttagattttacgcgtttttcagcatcttctttcatttgctctttaagcgcagcttcatcttggcctgagaattgagtgtaaagctcaaggttcatgccttgcatttgcagacgctgttcgaattctttcagcatgcggtcaagctcagtgtcgaccattgcttgcggaacatcgatttcagcattttcagaagctttcagaacaagctcttcacgcaatttagcgtcagcttcgttttcttttgcttcttctaaacgtttctttgttttttcagttaattcagcaagtgtttccacttcttcatcgatatcttttgcgaattcatcgtcaagctcaggaagctctttcgctttgatttcgtgaattttcactttaaacacagctggtttgcctgcaagatcttcagcgtggtactcctcagggaatgtcacttcaacatccttctcagcacctgcttcaaggccaactaattgatcttcgaagccagggatgaatgagccagaacctacttctagagagtagttttcagcttttccgccttcgaaagcttcgccgtcaacgaatccttcgaaatcaagaacaactgtgtttccttcttcaacagcgccttcttcttttacaacaagctcagcttgacgctcttgaagggcttttagttcgttttgaacatcttcgtcagttacagttgtgtcgtctttttcaatgcccaggcctttgtattcgccaagcttcacttcaggttttactgttactttcgcagtgaagattaagctttcgcctttttcgattttttcaacatcgatttcaggacggtctacaggctcgattccagcttcttcaaccgctttagggtattctacaggaagaagaatatccaaagcatcttggtaaagagcttctacgccaaagcgctgttcgaataatccgcgaggaattttacctttacggaatccaggaattgaaacttgttttactacttttttaaatgcatcatcaagtgctgttttaaacgtttcagcatcaacttcaaccgttaaaacgccttcgttgccttcttgtttttcccattttacagacatgtgtttccctccaaaaatctattcaggttgtgtcggtcttccattctaaagcaatcattcggcttcgtccaacaaaaacaaagctgccaaagatcagaatcattatgtatagatgttaataatgaactgcaaagcctgtccaaccgtatttcttataacccgttatacacaaatacaaccactatattataacataacacatagcgctttcaactatatggcgcgatttacaaataagaaatttcttcaatatcttttaacattgtgcaagcttcatcgagttctctgtcggtaaattcatacatcatatgaagttcttctctttcaatttcaattccgtgcatctcgtaaccgactttatgcagggcagccgcccaaaggtcagccgacagcaatttcggctggaacggatataaaacgtacaaatgtcttctccacaattcttctactgccgcgtataaggttggattttcatttccaagtgtttcatccagcaccctgagaacacggtgcagaatcggcgcggcatcaggcggaacaatctcagacggttcaattgtcaacgactcgccaaatttactaatgtgtacaggtttactgtactcatgctcagctaacagcatgacaatcatcgttttgataatcggatgggctgaggggtcttggaggattgttttgagcaatcctgtatactttgctacgttacggtcttttaaggaatggatgagattcatttgctcctcagggcttgccagcactttctcggtgtcaattgtatcctcatattcttcggcccaagcctcgtcctcacgatctggatcggtcattttccggctgaaatccagcagcttataaaattgctcggcgctttctgccggcagctgattttcttccaaaacggcttcaatggtgcttttgacttcttcgtattttttgagctgaattaagatggtcatgtacacctgcaaaaccgtaaaataatggccataaccttctttgagcatcttctcgcacacgctttctgcctcttccagctcgcccagctctaaaaagcagatggccatccctaagtgaagatcggattcagtatcatcatatttcatcgcttctgaaaacagttcaagcgcttcttgatactttttttccttgagtgatgacatccctttttccacaaggcggtctttcagatgaggaaaaggaataatttttgcgtttttcttgtcatgcgtcatacctatattcctttcaggcatttattttgttcaagtgtatcaacacctgtgaacaaacacaagaaatgaaaggtttcaccaggcaaaaaaagccgccggacaaataccggccgctttttcagtcttgaagccaagagcttctttgtgattcaaattgcttgatttcatcttccagcagcagcgttaatgaaatttcatcatatccgttgatcagcatctctttccaatgcgggtcaacttcaaatgaaatttgattgccttcactgtcatgaatcagctgattttcaaggtcaacagtcatttgcaatgacttgttttcatactggccgacaagctgtttccaattgtcatatggcatgcggatcggaagcatgccgtttttaaagcagttctgatgaaaaatatcagcaaatgacggcgcaatgataattttaaacccataatcatcaagtgcccacggagcgtgttcacgcgatgacccgcagccgaagttttctcctgctattaaaatggaagctccttgataaacaggctggtttaattcaaattcagggttcggttcaccattcgcatcatatctccagtcaaagaatgcaaaacgcccgtagcctgttctttcaatcctcttcaaaaattgcttaggaataatctggtctgtatccacattgatccgatttaatacggctgctttccccgtatgtgatttcaaaggttccatctcgcgcactccttacacaactgttttttcctgataaaactttctgacatcaacgaagtgtccgtgaatggcagccatcgcagccattgccgggctgacgagatgtgttcttgcaccttttccttgtctgccctcgaagttgcggttagaggttgatgcacagcgctctccctcaggaacaacatcattattcatactcaaacacatgctgcagcctgactctctccattcaaatccagcttccaagaaaatctggtcaagcccttctttttcagcctgaagcttcacgctttgagatccgggcacgacgatggcccttacgctgtcagctaccttcttccctttgatcatatcagcagcctgtcgaaggtcagtcatgcgggaattcgtgcaggaaccgataaatacgtgctccactttaatgtcttcaattttttggtgaggagtcagtcccatatattcataagcgcgaatcgcttcttttttatcatcttctgcagaaaagctttccggcgcaggaacttcagaatcgacaggaagaaccattcccgggttaatgccccatgtcaccataggggaaattttgttgccgtcaaggaagatagatttatcataaacagcgcccgggtctgtgcgcagcgccctccattcctctacggccttgtcaaattcttcgccttttggcgtgtacttgcggtttttgcaatattcaaacgtcacctcgtcaggtgcaatcaaacctgctcttgctcctgcttcaattgacatgttacaaacagtcattcgttcatccatcgtcatatttctgaatacttccccagtgtattcaatgacgtagcctgtgccgaatttcacaccgtatttgccgatgacagaaaggatgacatcctttgccgttacccctttttgaagcgttccatctacgcgcacttcaagtgtttttggacgctgctgccaaagtgtctgtgtggaaaggacatgttcaacttcactcgtcccgattccaaatgcaagagcgccgaaagcgccatgtgttgatgtatgactgtcaccgcacacaatcgttttccctggaagcgttaagcccagttcagggccgacgacatggacaatcccttgatccacactgtgaagatcggcaaggcgcacgccaaattcctcacagtttctttcaagcgccgttacttggcgtttcgcaacttcatcctttatctcaaaacgattgacagtcgggatgttgtggtccattgtcgcaaatgtattttggggtcttctgacctttcttcccttttgtctcaaaccttcaaatgcctgaggagacgtcacctcatgaatgaggtgcaaatcaatatagagaagatccggctttccctcaccatgttttacaatatgctgatcccaaatcttttcgatgattgttcgaggcatcatcttttatttcctccctctacctagagctaagaccgcttaacgtaagctgtcacacattagaaattgtattttcactcatgattgctgccttaacttcctctgtaatggcctgagtgctgctgaactcttcaccccgtgccaaatcttttgttcttttcccagaagccaagactttgtttaccgcatcttctacagctttcgcttcctcttcaagcccgaaagatgttctcaaaagcattgccgctgacaatatggctgcgaacggatttgccatccctttaccggcaatatcaggcgcggagccatgaacaggttcaaacagatgaagaccagagcttgataggctggctgacgggagcattccgagcgagcctgtaagcatggacgcttcatcgcttaaaatatcaccgaacatattttcagtcaccacgacatcaaattgattcggtgcataaattagctgcatggccgcgttatccacaagcatgtgctcaagcttcacatcaggaaactcttgtgcaacgtcctcagccacttcacgccacagccggcttgattcaagaacattcgctttatctacagaggtcactttgccttttctggctgccgccattttgaagccctctctgatcactcgttcaatttccgttctcttataaaacagtgtatctactgcttcctgctcaccttcagtgtttacataacgtttgctcggctggccgaaatacaagccgcctgtgagctcacgaacgataacgaaatcaacattatctatatattcttttttcaaaggcgaagcgtcagaaaggctttcaaataccttcacaggccgcaaattcgcaaacaaatcaagctgttttctgatgctgagcagccctttttccggtctcagttccgaaggattttgatcccatttcggtccgccgacagcgccaagcaatatcgcgtctgcatttttacaagcagcaacggtttcctccgggagggggttatgatgttcatcaatagccgcccctccaatcaggccatattcaaattcaaattcatggttaaagcgttcggcaacacttttcagtacgtctgtcgctgattctaatacttcagggccgatcccgtctccgggcaatagagcaatacgtttcttcaagttaaccgttctcctttcttttatgatccgacagctgtgtggtttttcaatccgctcatattcgactggaaaaccaattgacggttgactgcgttcaaataggctttcgctgatgcttctaatacgtcttgcgctatgccccgacctgctgattcttttccgttcaccaaaactcttacatacacctgggcaaatgcatcttcgccttttctgttagactgaatgcggtagtctaagagctccacgtccttatcgatgcagcgctcaagcgtattgtagattgcttccacacttccagctccagttgcagcttcctgaataagctctgcgttttcttgatttttcaacgaaagagtagccgtagggacctgacttgttccgtaatgtacttgcagagaaagaaattcatacccaatcttgcgatctgttactttttcttctaaaataagagaaacaagatcctcatcagtgatttcttttttcttctcagtcaactctttgaacatcgtaaagaatttattaatctcttcactgtcaaattggaatcctaaagcagtcagccggtctttaaatgcgtggcgtccggaatgtttacctaggacaagcgcatctgcggttacgccgacaagctccggtgaaataatttcataagtcgatttttcctttaaaaagccgtcctgatggatgcctgattcatgagcaaatgcattatctccaacaaccgctttgttgcgcgggacagccatgcctgtcagtttgcttactaaatcacttgttctcttaatctcgttcagtgtaatacctgtttcgacttggtagaaatcttttctggtatgaagggctacagcaatttcctctaatgccgcgtttccggctctttcaccgatcccgttcacagcgcattcgatttgatcagcgccattttcaatcgcagcaagagagtttgcgactgccattcccaaatcatcatgacagtgggctgaaagctttgctttgtgaatgttcggaacgttttctttcatatatttaaagatatttccgtattccgccggggccaggtagccgacagtgtccggaagattgataacactggcgcctgcgtcaatcactttttcgacgatttctgctagaaacggcagttcagtgcggcaggcatcttcagctgaccattgcacaatcggaaaacgttcttttgcgtatttcaccatttcaaccgctctttcaatgacttgctcacgtgtcattttcagcttgtgcttcaaatgaatgtccgatgtggcgataaaaacatgaattctcgggtgagaaccttcttttaacgcttcccaagcagcatcaatatcaccttttacacaacgggccagaccagttactgaacaatttttaatggttcttgcgatttcctgaacagctaaaaagtcacctcgggacgaagcgggaaatcccgcttcaatgatatctgccccgagtctttcgagctgcttagctatggcaagtttctcctgtgtattcaagttcactccaggggactgttcaccatcacgaagcgtcgtatcgaaaaaattaattttgcgcaacggagaccaccgcttccttcttcttgccttgtttcacaaacggcatcatttcacgaagctttcttcccactacttcgatttgatgttcgttctcgcttgcattgatagcattgaaacgaggacggtttacttggttttcgacgatccactcttttgcgaatgtaccgttttggatatcttttaatacttctttcatagattcttttactttagcgtccacaacgcgaggacctgatacgaaatctccccactgtgctgtgtcagagattgaatatctcattcctgcaagtccttcttcgtacataaggtctacgattaatttcagctcatgaaggcactcgaagtatgcaagttcaggctgataacctgcttcagttaatgtttcaaatccggctttgacaagcgcgcttaatccgccgcaaagaactgcttgctcaccgaacaaatctgtttctgtttcttctttaaatgtcgtttctaatacgcccgctcttgcgccgccgattcctttagcataagcgagggctttgtctcttgcttctccagtcacatcttgatagattgcgaacaatgccggtacgccagctccttgctcatatgttcttcttaccaagtgtcccgggcctttaggggccactaagaatacatctacatccgccggaggaacaatttgatggaaatgcacgttaaatccatgagcaaatactaatgattttcctgctgtcaattcatctttgatttcagcttcgtatactttttgctgttgctcatccggaagcagaaccatgatgatttcggcttgggctgccgcttcttttactgaaaatactttatgtccgtcttcttgggcttgagtgaaagattttccttgtctaacaccgacgatcacgtctactccgctttctttaaggttcagggcatgtgcgtggccttgcgaaccgtacccgataaccgctactgtttttccagccaatacgttctctttgatatcaccgttataatatacttttaccattttaatctctcccttgttatgttttatacaatagatattgttttattggatgacgccttttgctgggttcccctcgcaaaagccgttgtacctgttctcgcgatttctttaatgccataaggttttaataactcaataagcgcttcaattttgttagattcacccgtcacctgaacaacgatgctgtctctgctgacatcaacgacagaggctctaaacggttctatgattccattaatctctgttctcgttgaaggtgcggagacaaccttgattaaggccagctccctctggacaatcgattgatttgtgatgtccgtgactttcagcacatcaatctgtttgttgagctgtttcgttaactgttcaacatcattttctccttcaacgtgaacgacgaaggtgattctggaaacgccggctgtttctgtgtgcccaactgtaatgctttcaatgttgtaatgcctttttgtgaatagaccggtgatccggtttaacaccccggagcggttcaccacagtcaatgtgataattcttttcaaggtttcacccccaccatttcatgcagccctttccccggagccaccatcgggaatactttttcttcgctggcaacccgcacatcaatgacaacaggttctcttgatgttaatgcctcttccagcttttcctttgcttccgcttctgatgaaattctgatgcctttaatgccgtatgcttcggacaatttgacgaagtcaggctgagaagcgaatttagattctgaataacgttcttcatagaaaatttcctgccactgtctgaccattccgagacaagcgttatttaaaatcactaccttgaccggaagatttaattcgcgaataacatcgagttcttggagcgtcatttggaatccgccgtctccgacaaccgcgacaacagtagcatctttttcggccagctgtgcgccgatcgccgccggaagaccgaatcccatcgttccaagtccgcctgacgtgacccatttatctgctttttggaacggataaaattgcgctgaccacatttgatgctggcctacatctgttgcgacaatggcctctccttttgtaaattgatgaatatattcaatcaatttctgaggtttaaaaccttcttcttcattatctacataccagagcggatactcttctttccattcagcgagctgttttttccattcgcttgaatcgctttgtttgccgtcttgtttgatcagctcctgcaggacaattttgctgtctccgactacaggaatctgtgttttcatgatttttccgatttcagctggatcaatatcgatgtgggctatctttgcgtttctggcaaagtgtttcaggtttcctgtgacacggtcatcaaaacgggcgccgatactgattaatagatcacattcatgaagggccatattggctgtataagtaccgtgcattcccgccatccctagaaaaagcggatggtcagccgggaagcctccgagccccaaaagggtgtgtgccacagggatttgctgctgttcggcataattttttaattcttctgacgcttttccgtgcagtacgcccgcacccgccaggatcaccggttttttcgcactgctcacggcttccacaagcttgcggatctgcaaataattcggctctgttgtcggctggtatcccgggagattcatctcatgatcgtagctgaattctccttcaattgttgctacatctttcggaatatcaatcaatacaggtccgggtcttccagttgttgcaatatggaacgcttctttaatgatgcgcggcagatcttccggctggcgaacctggtagctgtgttttgttactggcatcgtaatccctaaaatgtctgcttcctgaaatgcatcgctcccgattacagaggttgctacctgccctgtaaagacgactaacggcaatgaatcaatcatggcatcagcaaggcctgtaacaaggtttgtcgctcccggccctgacgtggcaatgacgacacccggttttccggagacccttgcgtatccctccgctgcatgaattgctccttgttcgtgacggggaaggatatgtaccaaccctgaattgtatagcttatcgtaaatcggaagcacagccccgcccggataaccgaagatcatttctactttctctttttttaatgattcaatcagcattaatgctccgctcatcgtctgtgtacattcggcagatgctgaatccacctgtacattagtccccattttagttcctccttttggattttcatcctttaaagatcatcttttcattagctatatagctgattattcaataaaaaaagcccttccgcccacaatcagccgcgcagtaactgcgatagctaaaaggggcgaaaaggcttttctttccgcggtaccacccttgtttacggcctgttaatcggccgtctcatggatatttctatccgctttagtaacgagtgaatcaagttcacccggccaagtcctactgtcatttcagactggcactctgaggcgagttcaccttgtaaagcttcgccggttctcagctaacccggttctctgtggaaagctttttcaaggctacttatcctcatctgcgcttttcatattcagccttcggaacggttttccagctgttcaagaaggtcgtttgtttttcactttttagaatcatactgcgatgattttcgcttgtgaagcttgcgtttatcttttgttgaactcatattacgccgctttggacgcagtgtcaacagcattttttaaaattattagacaattttgattaatcaatctatattgtatacgctttcattattggtacaaaaggaattgcaaatgttaaaagtttttataatttttttattaatctatcaagaataaaccagaattatttaattttatataaacatgtaagattttataacacgctatggttcgtatatggattgagtctgacagatcatcttgcaatccatttcaatttcggataggcacccctattattcctcggcatacattaatggtatcttgcaaagaaaaggtgatacgatgaataaatcatttgcagacatgcaaggatttcctgcgggctttccaagcttccccaactttccgcagcagtattatcctgctacccctgccttctaccagcaaagccagcagccatttggaggctacggatacggacagccgttcagtcaggcatacagcccgttaaccactccctctggaatgtactcctcattcccatacgcttcagggttttacggacagcaattttcaggtgcaggctttagcggccatggcggcagcttaagtgctccagcgatacatgccggcggattcagcggggcgccaggcgtacacggaggctttagatattaaagaagaccacaagggccgaacatctattgcggtccttttattgttttaaaacgacttcacaaatacagtcacattttctgtctttatatttggaaacaggatggaatatgattagatgaattgaacgatattctgcacaatccgtaagttttcgaggaggaataaaattgcatataaaaatagacgatttaactggacgtcaggtggtttcactggtgaatgagcatttacatagcatgacgcttatgtccccgccagaaagcattcatgccttaggtttagaaaaactaagagggcctgaaataacattttggagcgcatgggaaggtgatgaactagctggctgcggagcgctaaaagaactggacacccggcatggagaaatcaaatcaatgcgaacatctgcatcacatttaagaaaaggcgttgccaaacaagttctccagcacatcattgaagaagccgagaagcgaggctatgagcggttaagcttagaaacgggttcaatggcttcatttgagccggcaagaaaattgtatgaaagcttcgtttttcagtactgtgaaccgtttgcagactacagtgaagatccaaacagtgtgtttatgactaaggaaatgtgagacgattttataaggatagataagtgcaggggaaggtctgtcttatctatctttttttatattcacacatttttcacctttatgatacacgccaatgttttcaattttgtttaattcaaagaacagcgggaattacaaacgacatgaacgatatcatgcaaattcataaaggaggagattgatatgaaaagcatagttggtgtatatgaaactccgcaggaaaccatcgcagcgattgaaggcttactcacaaaaggctatgattctgatgacatttctgttgtgacaagccggcgagatacagattatttggagtcacgtacaggaacagaagtcaatcaagccatcgatgcacatcaggacgaatctgaatcttttttcgataaactgaaagattatttcacaatggatgatacttctacacacagcaaagcattatccgacttggatattaaaactgatgaaatagacaagtatcaagaagatttggatgacggaaaacttctggtagccgtcgatacagatgcaaatgtaaatgctcctattgataacggcaatgccctttcaggcggcttttcaagcacaaatgaattggattatacaacgaaagaagaaaaaacgatgccgctccgggaagaacagctgaaggtcgataaggaagacgttcaaaccggcgaagtagaaataggaaaagaagtgaaaacagaaaaaagagatatggacattccggtgagacatgatgaaatttatgtcgaacgccgtccagtggatgaaaataaaacggacgctgctcccgtcaacgattcggaagagatcagagttccaatcgttgaggaaaagctggaagtgactaaaaaaccggttgtcactgatgaagtggttgtcggcaaacgcactgttgaagaaaatgaacatatttctgaaactgtgaaaaaagaagaacctcgtctgaataaagaaggaaaagttgacggcttggatgatgatccgttaaataacaaatgaaaatcataagacgacaacaaaaacctcaaatccatttaggatttgaggtttttcttttggtacgtcccaggagagattcgaactcccgaccgacggcttagaaggccgttgctctatccagctgagctactgggacacgttttgtttttcgctttaactatcagcgacaagatttattatatatgggatgcaataataagtcaacggttttttagaatttttttcatgaggaagaaaattttcttcctcatgacattttcatagtgtgactcggttttgcagatcctcaatttcattgcctgcttggtcgtaaaaacggactgtcgcagcatcattttctaatgtcagtatagcatagctttctgtcctgcgcaccctcggaagccggatgctacctgggttaatcatcagttttccgcgcagcacttcgcttcccgcgatgtgcgaatgcccgaagcagataacatccgctccgagctcctctgcacgatagtatacgtttaacaaggtctgttttataccgtgaaggtggccgtgtgtgaccagtatttttcttgagccggcattcagaagaagctcgtccttaaaatcgccggcaaaatcgcaattgccttttacaaccgcataaggctccaatgcaggatgcctcgtttcaagctcagagtccccgcaatgaatcatgagatcaacttctgcctcatgccgtttcgcaatggtttggagttcttcttcaagcccatggctgtcactgataatcagcacgttcatgtacaagcttcctccttatgcctccaaaagcttagacagctttttaagcgcgtcagccctatggctgattttatttttttcatcacttgtcagttcagccattgtcttatctttatctttcacgataaagattgggtcatagccaaagccatattctcctctcggttcttcggcaatatacccttcaacatggccttcgactgtttttgtttcctctccgggaatactcacggccagtgcgcagcggaaacgggcggtgcgctgttctttttcgatacctttcagctcgctgagcactttttcgatatttgcctggtcgtctttctgttcccctgcatagcgggctgaataaaccccgggtctgccgccaagattatcgatggatagaccggagtcgtccgcaatcaccattttgttcactgctttggcaacagcttccgctttcagaatggcattttcttcaaatgtatggcctgtttcttcaatttcttctgtgaatccaatttcagctaaagatttgacatcatagcctcttggctcaagaatttctttgaattccttcacttttcccggattatgtgtcgcaataattgcttctttcatgatgatcaagcctttctgtctttatttcagttctggcagagaatcacccagcacttctttttgcttgtcaatcagctcttgaattcctttttccgcaagacccagaagaccgttcagatcctctcttgaaaaagtcgcctcttccccggttccctgcagttccacaaaacggccgctgcctgtcatgatgacattcatgtcaacttcagccgaggaatcttcttcataatttaaatctaacaaaattccctgttccttatcaattccaacagagattgcagcaagaaaatcagtgatcggatttgtcttgattgttcctgctttgatcagcttgccaatcgcaatcgccatagcaagaaatgcgcctgtaatggaagctgttctagttcctccatcagcttgaataacatcacagtcaatccaaatcgtccgttcaccgagcttttccagatctacaacagctcgaagcgcgcggccgatcaggcgttggatctccattgttctgccggaaattttccccttagaagattctctgattgttctttggtttgttgcccgcggcagcatgctgtactctgctgtaatccagcctttccctccgccccgcaaaaacggcggtacgcggtcctcaacagacgcgttgcagattacctttgtattccctgctgttattagaacagaaccttccggatggctgataaaatccaaatcgaatgtgattggacgcagctcatcgtgttgtcttccgtcatgtctcatgttttacctccgattgtatgtacataaaccatttttgtcccggaattgaataaagaaagaggcagccggaacgctaacctctttctttctagtatatcaaaaatcccaatttaaaaactacccgtattcacttgagatggtctggagaccggttctgtgagcttttcgcctttttcatttacaagctctgattttccgttcactttaacagagacgctttttacatccggctgctccgttaacgtcagcacaatgctgttcagcacttctgaagaaatcattttcgtcttctcatcggcgctgccgaatatagattgattgaaatccaacgtcacgcgcccgtctttgattttcggtttgctgaccagctttacatcttcactgaagtctgttaacagcccgctcaccttgcttggccctttagccaattcattgatggctgccgtgatgtcgtctttttccgaattgtcgattcgtttggtcaccggcacgtagtattcactgtcttcgttttccgccaagtagtagactgtcagcggatgggtagcagtgagatcatttacaccggctgtttccaaattaatgccgtctttgcggcttaaatcatctgagatcggcgtccctcctacaggcatctccttcagttcatgcccgtttattctcagcttcactttatctatcgaactaaattgcgtcagtgtccacgtcacagattgaacgattttctgttcgtcttctttcttataatttttgaactcattagagaaatcagctatcgcggttccatcttttttgatgtcaacgttaacggtggtgtcagccggcaatacagctctgaagccattcggaagaatttcagacacaggcccgccctgtacgaggtattcaagcgcctgcttagccgtgctctcacttttagggagaggcagcgtttgcgcaacaacatatccgtttttatcaatgagataaagctccctcataacagtagatgaggcttgatccgcttttgcggtatcgcttttttcactttctgtttttttggctgctgttgtatttgaattggcacccgcttcatcgttcacgaatgtaacgtcttgaggcggatcaatttcctcggctgccttatcagattgaaacaaaccgcatccggataaaagcaaggcagaggtgagacaagtggcaccaatgactgcaggtccttttttcagcatacttttccctcctaaggatgtttgtactattatgtatacgagcctctttaggaaatagaccgaagaattccggcaaaacagaaaaaaacccgcaacataccgttgcggggaaaactatcttttaatcggttcttgcagtgagatacattccacatgcccgacttcatggccaaaccaatcgtctgcgatttttgcaaactgatcacgcgcccctgttgtcaggaactgatgatccggggcaatcggagactggttcagcagccctttataagagagaattgtgctgacttcccgggctgtttcatcgccggacgaaataatgtttacgtgctctcccatatatctttgaatggcttcttttaaaatagggtaatgggtgcagcctaaaatcagcgaatcaattgatgtgtcttttaacggatacagcgaggttttaacaatctcgtctgctgttttgtcgagaaacttcccgctttccacaaaaggcacaagcagcgggcaggcaaggttttcaaccttcaaatcagggtttaatgccaaaagcgcttcttcgtatgcattgctcttaatcgtattctctgtgccgatgacaccgatatgctgattatccgtcacttttatcgctgctctcgcaccaggctggatgactccgaccaccggtataccgacgctgcgctggatgtcatccaatgcgatcgctgttgctgtattacaggcgatcacgagcattttgatgtggtggttttcgagtaaataattcgtcagctcccacgtatattgaagcacctcttcttcagggcgcggcccataaggacaccgtttcgtatccccgacgtagataatattttctttaggtagctgtctcatgatttccttcgcaacggttaaaccgccaaccccggaatcaatgactcctattggttgttccaacaaaatcgcctcattttctcttcatttcatgctgcagtttcatcaaagatttttcgaagatggctatttcttcatctgtaaacgattcgaacatatcacgcagatattcctgtctttttgtaatgacctcttggataatccgttctccttcaggcagcagatgtatcctgacaacacgtctgtccgccgggtccttgacccgctcaacaagctcatttttttgcatgcggtcgattaagtccgttgtcgtgctgcatgccagatacattttgcccgataattcaccgattgtcatatctcctaattcataaagccattgcaagccgacaaattgcggcggcgtaatcgcatattggttaaggatttctcgtcctttttgcttaatgatcgcggcaatgtggcggagtgacttttcaatatccgcaacatgctccaaaggttttgatgtcatttgtccatccctcactcaaggatctcttacgcacaaaagcgttccgtgtctattttccttcttttttgaagaaaatgcaagactcgcaggagagaaatagaggactttagtcaaacaacatcaagaaataaaatttaatttatgacttgcctacgttttgcacagcattccaaatatggtttcgaatgttccaaacaaacagcaataaccggctccttccaaaagaaggaataccggcaaggattaaagctctagctcacccattctaagaagctcaacaacggcttgcgaacgccctttcacacccaatttctgcatggcatttgatatgcatatctatcgcaaactaaaacaataataatcacttgaatttataatggaaatcgactgttccatcctcgtatattacaagtttatcaataagcgctgaaaatgcttcgaataaatcctgatcagttctttccagctgtgcgaatgcattcttaatatttgatatgtcgattgtttcttcttcctcacgctcaagcatgaacagcttatcgttcagtttttcaatttgttcttcaagctcttttcgcttcgcctggaattccgccttagtgatcaactgatcttccaagtacaattcgattagacgttttttcttgttttctgcgttttcaatttctattttcgttcgcttgatccggtttttcttctgctcttcaaaatcagattttacatccagttttaacttcttgcccttttgtttcagtgttttaataacaaaagcccgcaagtccttatattgcatcggagcatggtttacacaaagagcagttccacctcgtctgtaggcgctacacttcaaataattaaactctttcttctcacgtttctgattgtatttgtacgacggtagcacaaccatattgcaaccgcacacaccacatttcatcattcctcgtagctcattccgagggttaaaacgctttttacgcatcttgtgttctttgttattagctttctcatactcttcttctgatatgatcttaggacaccagtctttgtaaacagtccatttttcttttgggttgcggataaattttttccgtccccctattttgacttgagtatgtctattggcaataaacacgccacaataaataggattctttaaaatcgtttgtactgtagacagctgccaaaactcagtcttttgaggctttacaatgtttccgagtgccaattcttcgttgagcttgagaacgattcttttatgtccatacccatgattattatgaagatcgaaaataaaacgaacgacttttgcttcttcttcattgatagctaggaatttaccttctttcttaaatccaaaaggtacacggccggaatgttcaccacggcgagcttttgctgctagtgccccgctggctgccactgaaattgtttgaggatattgggcagcaaacattgaaaacatttcaaatttcattgagtttttgccttcatatagactatcgtacccctcttcgagcgtcacaactcttacaccgtgggccaataaaacctctcgaatttcaagggcatctttaagatcacgagcaagccggctgattgatttaaaaacaaccatcttcagctttcttttttgcgccttatctaaaatgagttgcatcgcttttcgatcaagcagcactgtcccgcttatcccatcatctaattggattgcttcatctttccattcgtaattatttttctcaatccaatgatgacaaatatcaatttggttggctattgatgtcacctgttcatctttttctgaggaaacccgtgcgtaaactgcataagggtaatcttcatatttgatgatctcctgtgtttctgtctctttgaagaacactaaaccaccccattattttgcatttggtacattttagtgtgattatagcataatgattacgaacctcctatacttttccggttgattttcgaacatttgttcttgtataatttgttcaaggagttgatcagaatgaacgagggtatttatgataaaagatgggaacaaaaatttattttgcctgagcaaaggacagcgctattaaataggaagaaacaagtccaaaaaattgaaaaacccatcttagatgaataccaattggaagatatggcccgtgttatttgcgaggcgatggaattcaactcggttctggtcatcggtgtatacagagacggttttatcgaagaagtaaaaggacatgtccattacatagatgaagtaaaacagaggctgcacgtgaaggatttaaaaggtgatacaaattttattgcatttggttcagttctttcagtagagcaaaaataaaaagaaccagccacataataagctggtccttatctttaattaaagaaatggttatgtaaagctttagaaaatccaaaaccttcttctggtccctttaaccagagagaaataaacttttcgaaatctacttctttttcaatatctttcaaaattcttttaaattcttcagtaaagttatgaagagagacctcttcgccatttttaagtttatcagtgtactggctcgttaactctcttaatccttgatactgtttttcacttaaatcataagccaaaacttgatcaaataagccaaaccgatcataatcagctgctaattgttggactaaccttagttgaaaagcctgtttctcgacttttttttctaggttgtcaagcctttcttctactgttaccaattcaaatcacctcaattaaaaagctaagaaagtaaatacacttgcaatagttctagctgtagaagattttacaccagcatcaattagatatgaggaaacagtgtcaataattgcgtcctccacaacgtcacctcgtttaactaactcgtccaaagcatctgctacatcatcagtatgttttgcgaaggtttttcctgctgatccacctaactcatcgactacctcaccaacaattctcccaccatgtcgaagcgcactggctgttgccttcattgcttctttagcaatccattttttaataccatttgtgtgaaattcaccagattgttcagttgtattagttgataattcggatagtttagcaggagtttgataagtgacttcttgctgtgcctgtaatgttacctcttgagctttggcatgtccatccaacggaagaactaatgataaagagaaagttaatgcggatgttgctaaaagtaatttcttaaacatgaaatcaatccctttcttttaaattatttacatgtaaatgatagcattatatttcgactagaaaaataatgctttttactcaaatattagaataattttgaactatctgtaacaaaataaacaaaagtatctcctcgagaaagatactcaaggagactatttatttacttcaagagcgcttctagtttcgctttcgtatctggtccatatataccgtcttgaggaagcccgtacattgactggaaccttctaacggcatcagctgttttcggtccataataactatctatcccgaagtttttagcttttttatccggatagaaatgcaatgccgccagcgctgtttgaatctgttcaacagcatcactgtgcatcaatgggctcttcactttgaaaatgccagaaggcagattgaaagatgatttctttttgcttgagcttggttttttcactgccttggacgaagttgttttcttgctggatgatttgccgccaagtgcttttaattcagcatcaatagccgctttaacctcattccagcgtccctcgtctaaaatacggtgagggcaatactttccgctccaatcttggtgcttccgcactcgatcaataccccatccgcgttctttaagcagctgagcaacaaacttgatagccaacttttcagcagccctgtatttaggccctcctgacttgctgtagcagatttcaacgccaatagacttacggttcccggtaccgtttgttccgtctcctgtatgccatgcattgcgatctgttgggatgccctgccttacctctttatcatcaacagcaaagtgaaagctcgttgaacttgtgtttccgatcatatagctgacctcgttagcagcagatgcatcattgtaagtgttatgaatggtgatgtattccgcggtcatcggattagggcattttaaagcgtattttgcttctgatacaaggttctttttcactgcgattgtcataaatgatctctcctattctgcttttgaattagaaagagccgccagctggcagctcacttggttagattgtgatttttcaggacagctttttgctgatggccttttgcagtcacatagttgtttttgaaccatgctgtaaatgtcgtgccaatagtaaaggctatagagcccgcagtgtacagcgcatccgcaagctgattcacctgatcctccgtaatatccaaaggtgatttgccaagcatcagcattgtttggttgataagtgcaatcaaaagaagcaccgtccgaatgaccgtgcctttgtcaaagtttttcatattgtgttttcctccttatttttgcaaaacagtataaaaaatagcgattgcgccgccaataacgccagtgcatatcgctgtaatgatagcgccagttattgtgcgtttgatccaagttgtattctcttcgatcttgttgagtttttcgtttaatgtcatgatttgctggtcttgtctatcagaaacgcgttcaagaacatttacacgctgttcaatcgttttctggcctgccttcatttccattatctctttttgtaatgcatgcacatctggtacctccgtcacttctgacattagtacgccccccttatatctatttcacgtttttcacctccttagaggcaaaataaaaaagccttattgactggctcctgtcgtttcctcgtatggttgacctgttacttcttggtattggtcatgtgtaatgtattgtgcctgaacaccttctttcaagtcatcaacggaacaatcgttaaatgccatagcctgctttaccatggctgttgtggcccatttgtagaacaacgcaaatacccagaaattaagattcacttgtcattcctccctttaaatagagaacatctaattttaaagatgcaacttgctcacctaaagattgattcaaattttctgcttcttttcttgctagcacttccgcagtcaattgtacgcctaaagcattttgagccagctcagcctgttttcttgccagtttttcgtctgccagctgttgcccaagtgtagccagctgttctgctataggattggtttcaggaatactgccttgtttcagctgctctttgtattcttcatcagcagtttcaacccatgtttgtttttcctcatcgaataaaggccgccacataccctctccatttatttctggaggaatatcagtagcattcgccgggataatatatcttcctgactctctatcggggtgtaactcaaccggccttcctaaatagatcttatcctcaccatatgggtatattaatttcatacttctccctcctttctttaagttagaggcacatctaagtcaatataatatccattcactttagactcagtattagccattacccctgttagtttcatatcaccagatgcatatataataatcttgctgtaaccagtggttccgctagttgcaaccagtttgactatccctttgcttggagcgctagaagacgggatactagcaaatacaatctctctatcagtaagaacatgaccattaagatgcaatgtatttccgactttacggtattgtaaaggtctatcacctgtagttgccccgtttttgtatggaacatttagccacggcgtctctataaagtctaggtctgtaataacctctcgccacccagtgaattctccctctttatgctttgttccaatccatgtacggttatcataggatcttgttgcgacaattttctttaacccttgaggtggagcaaggtcagccggaacatctgtaatatcataatagtaccaggcagcatcatcatcccccggatgattcagaacacctgccccaaaataaaagccagtcggataatcaaaaaggttttgtcctttagttatctttattctctgaccgttttgggttgtcaggggatagagttgtccattattccatttgttcttatcttctttcgttacatgaatgtctgttttattttcatgagtattgacctttgtttgggctcctgctgagtattcgatttccatccaaggcgtccagttatctgatccactcaccttatttcttatgaatttccgccgattatcaggtatagaggttgttgcactggtataagctgtgaattcctgatatggataagtgccgtagttgtaaaccaataaataaccattgctattcacaggggcattcagtgccgttgaagctgaagtcatataataaaaccctgtttcaataacagtattgaaatccacgcctgacaagtttttcatcaaaccattgtcttgtgttaattttgataactgagccgcattccacttggttcgctctgcatcagaaatatgacgaatctggttatagttatgtgcgtcaaactccgttttggttgcctgtttgtcattggtaacattaccgagcccgacttgatcttttgtcaccccatgagggttgcttttatcattaatgtgttgttcagtatacgtttttgcatttttttcggctgtatcagctttgttttgcgcccctgtagtcgtttccttcgcattccaatttgaacgctctgtggctgtgatatggcgtgtggaatctgtattgtgtgcgttgaattctgttttagttgcttgctgcacgttgtctacgtttcctaaacctacttgggcctttgtgacttggttggggttatccctacgcgcagcaaattcatctgtataagcttttgctgtttttaaagcagaggaaacgtcatcctgcgttgccccgatctcttgcaattcctttagtgcatgataggccgtatactgataccagttgaaccaatccgcagggggatgatccattggtttgtatccttcatcaatggaggactgcgggggccgctgcccggcgttcccccattcaggcaattcttttgtaaaaggcataaacatcactccttaaatcggtaaagggtaatcatcttcaggctgaaagattccgccaagtgttcccccatctgtcccgtctgttgaaaatccatattgacttgtttctatagagttagcagaggacgaaaaacgaaaggtgccgtttaaatctacataagccacccgtacgcctgcagcaactgttttttgaacgatattcgaaaactgtgttgcactcattccaactttgctcaaagcctcaatgggtgccttttttacgataatggcagccggttcatcttcattattttccttgctgctgaaaatgtgtatttcacttggcttgcagttcagtgttttggctaaagcttcaatgatccggtttgtggtgccatctgaaacatttctggcaaccttgccgcgaataagcacacgataaatttcatcagtggcacggcccctatcctgcgacacgttgtcaccaagtagatccagagcctttccttttgccgcatcaatatcccgccagttctcagctgtggttagcgcgcttttaagtgctgtcagctgttcatcgacaattaaaaaaagctttccgatattgctcttttcatctttcaaaaaggcatcggtcagctttcctattaagtctttaatcatatgtgattcaccacgatttcatcaaaatgtacctgggcaacctctttaggttcaatttcaatgtttgactgtgaaaggtttgtcgcatctttccccatcctgattgttacatcagagacaccatctacttgatataccgcgttgaacaactgcgacaatataacatcatcgcccatttgtgagccggtatagtaagagccgtttgcatcaattcccccgattttataaacgaggttgtttttgatctgacttactccatcaatagggaaggaagcatttgtttttaaatccagctgcagatatattttgacttcccttgcaaaatcaaatttgacggcatggtcaagtccgctggcgtcagttatggtgacaacttgctccccgaccgtttcaattcctgcagcaacactgtcaaacagtgcttgcgcaacatcatcttttgtaccgcccagaacataagcatgaatgctttttggtgggttgccgtccgcatcggtctgcatggtattgttggcaacaatattcgccgatctgacgcctgacacgcttagcagggctgaaataatacctccgtttgtagatgctgaactgccctcaactgatttctttattcgtgcccggaattccgaatctgtttcctcgtcggcaccgcctgccgatggttccggatttgtaactgaatacacgccctctgagggctctgcctgcacggtaatggtatttgccgcaacattgtttataacgcccttagaaagcgagacagccgtccctgagcctgtcccattagcctcaattacaacatcttcaatcaattcaaaatagatgcctgattccgtagtaaactgagtttgttcttcaattacgatgccgggttctccagtaaaggacagagtcacaactgactccgcagctggctcccgcgtgatacccgagttgctgccaagacgatcgagctgcacgccctcagacttactgacaaagccgctgttataaaccctttctgcaatgtcccacaagccggcaagaaaccaagcaaagatacgaataataattcctaatggtgttttactggatgtgtttacatcctccccgaattgctcccgcgcccggtcctccatactatcaacaagctcggaataggtttgccgttgaaagcctgtttcatcaagcaagatcaacaccccctatctcaattgtttcttcatcctcttttgtcattttcacatgcaccgcaagactgcgagactctttatccattaaaaagttcaccgattccacactggcaatacgctcttcttgagaaatggcatttataatgtcatattgcgcctcttcttgatcaaactgctttcttaaaatgttgctgcgatcaaggccgacatgttcatcaagctcaaactctcctaaacttgttctaaggatcatttctactgattgagccagctcagcatcaccctcaaccatttgtaactcaccattttcaaaacaaagatccccgtctttaagcttgagagttttcatccttcccacactcctatgacaactggatcgtttatactgtgtgtgcgcctcgaatccggatcaaaggttttattgccgtccaggttatccagtgaacgttcagcaaacgaaacaaacacgcaggaccctactttaatatcagcttcgacgtgtttcaaaacaggcgcatgctcgattaaagggtattcatgtagatactcaccatcattggtttgaaacagcaatttcagatcggcagtgtgtttctcagcattgtaatttacaacccgtgctggcgccgttgtatggattgattgttttatccgctgttcgaatccgtcaaagaactttgtcgctttactcattaaatcaccctacattctgtgaaaaagtctttaccgtcaaaggaatgagagccatctttcacacgatattttcctttcgctgtcttgctgtttatttctatgattgaagcaactgcgatacgatgctgcaataggcacttcaccttataccctttgagatcatcttcctcaaattgttcaggcgtttccacaagtcctgttgcctcttcgagcttgaaacgttcgtcatccccttgactgagtggccgaataacaggacggccgcgccgataatacatgactgccccagcatcatgaatgacctcttcaagattgttttcaatcaatccggtgacacgatagccttttttataaactttatttttaggcagaatgatatttttcacttttataccgagcacacgcagaagcttatcgacaatttgccttgaggttgtgccagccttgaacgtgattttcatgtatctcttacggtatctgacctctgtccgagtgccataatttcggaccgttttatatgtccggccgttcttatctttttttacagtcaccactggttttgcgagcttgtaccgctttttcacatagtatttttcagcaggatcagcgttttcagtggttactttcatatgggtgtaatcatcgccatcttttgaatagatggccgttaccttattcaaaccgtcccaattattcagcaccttggtaactttaccgatagttaaaacaccgtaatcgtctttataaccagcttgaacagtgatagtgctgccttttttaattttgctgattgaatctttgctcaggttgtatatttcaacctttgtttcattcggtttaaagtcatcatcaaacgggacctcaaaatgaatctctaagtctttataatcgaaagtggtttgtgaactgccgttatctatcgtgaccttaacgacgcgcccaaacagcattttattcgtcgccatcgtcttctccctccgcatcgtccgagacatcatcaatataaagaaacacggtttgcataaaattctcgtatgtaacccgtgtttctgtattcgattcatccatagggataagggaaggcgcaggcagtttctcgtttacaatgtcttcccacaaagggacgttcaaaatcaatttttcgcccagcacgattgattccatgtcttgatcatataaatcaagtgaaaaactatcgtctgtttggttgtaattgatacgcaaaatgaacgtgtcatctgctaaatcaaattcaaactgctgtggtatgtcctctttgtcaaaaggaatgtaatctcttgatgccatgcctttccctccttcatctaatcctcattttgacccctatcggaattcttcggtccggccagggattcaaccgacgcaaagcatttactgtggtgccgtatttacgagcgcagccccaataagtgtcacccttcttgaccttgtggtataacttgccggatttttttgttttcttcttgctggctttcttctttttcccggctgttttcactttctttttgacccacgggctttttgcaatacggatttcttgcaactcaattgaaatagcaaaaccgtttgtgtaatcgcctgtgtcgcgatctatctttgtgatgatcacatttttagcaaccttacgcccggtataagtcaaaagagtgccggcataagcctgctttttcagatattcataatcactatttgctgttttgcctaataaatagccagagactgttgtcgtctctggctttctttgtacatggtccgtgatcggaacccctttttcaacgggatatgaagtgacctccacatccgcgccatcagattccttttcgtttacgagattaatctttccgagcttcgccaattaataagccccctctggtggataaagcgacttcagcatgtcgaaaacttcgtcaaatgtttcagttacagcctttttcacctttgtttctgccccttcactgccgccctcaacttttacgttgatcgacgggttaaaagtgatattgacagatgaactgtttgagcttgtagcagccttttctggtgtgtaaccagtatccgcgccaagctcccgaccgagtgcagcatacattccgagtgattggtttctgtatcgtggctcagttgtgatgacatactccctaaagccgttttcaccaagcgcagcgacttgtgggctgttaatgactccacctgtcgcataacctctatacggcccaccatgagccatagaaacgagcccagggtgttttaaaataccgccgtatctgctgttcaaatagttgatagcagcaaggatctggtcaactggatttttgatatttccgtgacccggttccttgtgagcgttgaatgtacttggtataaactgcataagcccttgtgatggatggccagctttcgcattcgaatcccaattgttcacgacattaggattcccgcctgattccttcatggcaatagtttcaagtgcgccagcatattcagagccaagccccttgattgatagcgcttgagctacccactttttgacggcttttgaaccgccacctgaaaagctttcagcgtaactggacattttgcctttaacaaaaccaacggccttatctttgacaaagttaaaagccccttttgcgatatcaccgaacgagccagccatagaaggtgcagagacacccattttttctaagacttttgttaaaagcttagatgggtgtccgatgtaatcaaaaacatcaagagcaacatctttcactttacctgcaacggattttacaccattccatgcttttgtgaagatatttccttctgtacctttcgcgtaagctggaactcctgataaagcagcccttgtctgtttagcagataacacctgagtgccttttgggaggttcattagtgtatcacttgcagggctgagtcccacatgacctgatggagtacgatacatttcaggaccagcgtttgcccctttaccgtctcccagtatagccgggcctcccgggtgtccgccggttccgtgtgcatacttaggtacaggccattcaggtatatgtttatctttcaaaccgatcttatcaagtacccagttcactccgccgattacaccatttactccttttccgagtgctccggcaagtttgttcgctaagctagtcacaccagacacagctttatgagccatgttcttaattccatcaccgattttacccggaagtttcttggccccttcgactaaatcattgaaacgatccataactttttgacgtaaatcaagcgccaataacgcgactttattttttatataaagccatctatcagtgattgctgaacccatattacttacaagctttttcaccatgccgacagcactagaaaaaatttgcttcactccgtcccacatcatgcggaaattcccagtgaataagcctttgaaaaccttcactattcccataataatgccgattgcaccctgtattatcgcaatgatatttttaagtgcaacttgaattattgagagcacaaccgggaacacagcagtcacgatatttaggatgaaacggatcgccggaatgaccacagttgtaatgatattcgccagaaattgcaaaagagaaacaacaatcggaagtaccgcttgtatgatttgcatgatctgcgggaatacctgctgcacaacttgaatcaaaataggaagtgctgcttgcgccaactgtaaaatgattgttgccgctacagtaagcaattgagccacgattggaagaacagccatgatgacttgtttaataatcgggaacacttgctgcaccgctgataaaattaacggcagcacttgaaccgctatttgtccgatggatgaacctaaaagctgaatcaattgcaaaacaatcggaagagcttgttgtacaatgctcaggatcaacgggaacgcaagctgaatcatttgaaccaaaatcggtaaggcattttgcacaattgaaacaaggattcctgagaaactgcctatcaattgaataatgattggcagcactgcattaattacgctcagaatgactggaaaaatcgtctggaagccttgaacaagtaacggtaggatgctgcttgctatttgcaagacactcgtccataaagtacccgacaactgcatccaagctgaaagcaattgctgaatcagtggcatgatttgcggaccgattgtctggaacgtttgcgagatagctgcagcaaacaaaacaagcgtgccgcctatttgaacgaaagcctgctgaagttgtccggccagctgctgaaactgtggcgtcaattgcgtaaccaattgcccgaaagactgttgaagcgtgttgatgattggctgcaatgcctgaaaaacagtcgttagaacagattgtaccgatgtccatgccgtctttaaggcctggcttacattttggtttgtttgttgcatgcgatacaaggcgccagcaacactcaaaatagcaccgacagccacaccgattggccctgacactccgaggaatgcaagtccgatcgccgcgacaaacggagcaacaagagaaaccatacctttaaagctggatagaccgactttcaactgctccatgaatcctttcacgatgccgtttagaccgtctgatagtcctttaccgaagaagtccgagactgtctttccggcattatgaatgaagcctgacacggttttcacagccgttttataggccgactcaattccagccactaactgtggatgcgattcaccgagacgatcccataatttcaaggattcagcctgcattttatgaatggctgtgatcgccacgttttgtgcgtccttgaatcctttcatgaatgcaggttttaaaccctcagcttctttgatcatggtatggaatgcaccgacaaccgccgatttccccatgtcagcaaagcgtttcatcgcgtctgtagctggcttgaatctttcctgaagcttatcgaaattcttgtacagcaaataaatgccggttacaaggagaacgattgcccccgcaacgacatacaccgtgcccgacatagcagccagcccggttacaactggaccaatgaacatccacaaactgctgagagctccaaggaacccattaactaaccctacccctatcgctagtggcgataaaagtagggttaaaacagggatgagaagcataaatccttggatcattttcgagagtacagggtgcgcctcattaaactgaataatcagcttcgcaacggccgtaatgcccttgtatatcgccatcgcaaacgccgcaaacacttcgattgctggctgaatggctttcagtagtgtgctgcacatctcttcccatgcctttgaatagccgggaactgtttgtgttgctgctttatgaagcccttggaacatgaaaaagtttgtaaaagccgcgcccagtgccaccatttgaaaacgcatataaccctgagtgatcatcattgtcatatcgttaagctctttcatgttggcagtaggtccgagcattttcagagccaaatgcgcagcagttccctgctttgccatgttctcaagcgtattcgatacggcaagcccagctttattgacttgatataatgggtttcccattcggtcatagttcgccgcaatcttctcagattgagtggaccgagccatcaatgtccctacagtctgcagcatgctcatgcgcatcattttgttgtttttcatcatgttgtctgttacttgcttgtgagcacgtcccagcctgtacacttcatccataaactgctgattggtgccagaccagctgtccatctggttccctaactgaaagaaaccatactgggctcggatcaattcattccgaaaaccgttcatgccatatcgttcttcatgccaggcttgacgcatttcattgagcattcgtattgtatcggcttctagtccacgggttgagccgcgcaaaaagtccatttcacggttatactgccggattccccggtagtccggggccgggacagccaccgcagccacgttattctgaacgctttgcgtgttctgctgggtaacgtttgctgcgggcgtaccgatacggctcatatcgacgttattcaaattttgcctgagttgatcaattgattcattggcgtttgttatagacgtttgatcaacattgatattaacctcagacggaaggctttgaataagtctgcttgtctcttgtacctgggtattcagctggctcaaacgggatgtaactaagtcgatttgaggccctagccgttctatcgtttgactggcagtttgcaacgatgagttgtccaagatcatactcatatggatgtctctaaaattccgctgttgcctttgaacctgagccatccgtgtacgcatctgtgaaaaactgccgccagcatcgccgacatgatcaacgagtctatctatttgctgatttgctctttctagaggggaggtatcaacgttcaattcaacgtcaatatgcgtacttcttaatgcttctgacaacgttcataccccctcatttcttgttattcctcttgttttcttgctcaatatggatgtcgagggctgcatttgcctccattagggtatcgagatccatcatcgcgacctctgagaaggagaacttcccagacatcacgagtctatacataggccagttgtcactcgccttctttttgtaatacggctttggtttgggtttcgtcgataagaaaggattgaacctctttcattaattccatgaaaccttcgtgttcatcgaaatattcaaagctcactttcggttggacaacgacttctttcatgaataactcatacatagcagctgaatttggtttacctaaattgaggttgactgcttcgtcctgaatttccaccattcgctttgttcctgggtgttgaagagtgtactcaattcctttgatagttactttcttttgtttaccgaattttgacataggttttccctccgcttgtttagtttgcatatattgaaaagcagccctattggactgctttcgcgcgtttgatttcttcttttttgccatagcttaattactgttccaatactgtatagtcaaagacttgaatctcgaactcacgatctccaatctcgtcactgaattcagcatcggcaggctttttgaccatcgcttctgtgccgccgattttttcctgtccgcccgtaacccagatagggaaacgctgggccgtgtttgccattttattcaggtatggtacaaatggcgatcccatggaaagagtcagtgtaattgttccgagtgggttgtttttcgttgcaacactgacatcacccttggcgctgactttagtcgagaacttttcttcgtcttttgcacaagaaaccattgtgccctcggaataaccggttacgattttcccgtcaatgttcgtgttgacttcgtttgcatcataaacgtacatgctttatatcctccttaaattgagatttcaccagtgatttcagcagaatgaaccgcgccagccagttcaaaagtaaatgataggccgtcgtatacacggttttttctgttttcatctgtgatttgatcacgggtttttgtgctgattgaatacactggctgcccgtctgcatcttctgcaacaatgccatttgcaaaggctgtttgcagaacgtttgtgacctgtacactcagcaatgaaaaaccagcattcgagaacgggattttgccgttgtttgagaatgctgattgtattgaggtttcaatattcaatttcacccaatctttgccgtgcagcacgtcgatatattccccggatgcagtaatgccctcggatgtctcgttgtggcccgctttggttacataagcaatagccccttctgtatgcagctttttcaactcgtctgccttaatatcttgaggcgtgatgccaacgatatttttaaatttccaagttactgatcccactgtatgtgaagcaaccgaaccaacaaggccagcgtccggatgctcgtcatttaacgggtgatagaaaacaattgtgcgatccttgcctttgtaagaagcaacttcttcccggtcagttacctgtaaaactacaaatttatatgatttctcttccatcgcttttgccgcttccattctttcgtccgctgtagcatcagcaaggatcaagaagtgccagtccttgtcgaaatactcgtcaaacgcattccgaatggagaatgttgcttgtgtagtcgctccttcttctggcgtttctgtgctgcctccatacgtaccgatggcaacctttgacggtgcattgtcaccctgagcaaagatagccgcagcctttttatatgctgctgtggtttccggatagtctgccttgatagcttctaatgagccatattctttatatgtgttgtgtccgtctaccttcgcaagaatcagaggtgttcccaatcctttaaggctggacggtttcactaagtcaattttgactgtaacgtcactaagtggcatatgaattaccctcctgtattttcaattcgtacagagtcgaaaacctctgcatttgcttctccatgagacacacgcgttctaaagcgtgtatcgaagccgtgacggcgttctgtgtcaatcgtgataaatgtatctcgattgccgaaaccgtcgttcctgacccatgccagcccattatcatgaagcttttgtcgcgcttcagctgttttgaagtacgctgctgtttgttgagcaagggaaatggcctcaatatggctgtttgaaatccatgtaaaagagaaaacaagctcgatgtcttccgttaacactccctgttcttcaatgcctctatgttggggcaaatacggggaagtcacggtatacgtacaaaaaggatagacaggttgtttccctgtaccatttgcaacgataacgacatggcctgttttctctctaatcagtcccaggactgtttgtattatgctgttgtagtccatctgaattgatcaccgcctttaagatatagctgttgaaatcggcatacgtcccataaggcgtcatcgcttcaacatcaaaggtggcgccatcaaaaatcacctgagcttttagaggaatttcgttcttgataaatagctgcctgtccatagatgtaagccggccgccagattgatagacaagttgtgactgtaaaggtactattgcccctctttcatctgacttcgtcggtttcggtggcacccattcgccgagatcatcatatgaaccctcttcagatggaataagcaatgtaaaatcaacgctgtaccgcttaatcagatcagaaaatatgaaatgattccccatcagctttcaacctcataatccatagagccaatcatttccccggtatcaaccaatggatttgaagagcctttctcttcggttgtaaatggatggtttgccgggttccgcaagtctcgggcatacacttgaagccgccctttcgcaagcaggccgactgtttccatgatgtcattcatcgaatcgccattctctaacgctctattgaccagatcctctaccttttgaacgatctcttcctcgttctcgtcccatccagcacggatgaaagaacgctccggaatgttgatatattgagtttctttcttgaggtacagcccttttgcagcaaggtagttccgcatgcgatcagttacagcaatacggcagccaaattcgtgaacagccgcgatcatttgccgttcactgtccaggattccaactttcaccttaccgacggaaccgaggtttcttatgacttctggaatacggttgctatctcgtacccggacgtttctacgtgccattagatcacctcagtgccctaaagcgtatttttctgtagggtcggaataactcatgaacaggattgagcctttcttcatcagctgcataggatctactcatgcctccaattgattcagatagaacaccggacgggctttctctgtcaatcttaattaatagggcaatccccttttttacggccggaggaagagacacagtattatctggaccaacaaagagattgttgcagtatgccatcgcatatgaaatactatcttccagatcaatttgcagtttggcatcctgcgatgtgtcttcagctggaatccctaacctgacttttaattctgccaagtccatttttctcattcctttcaaagaaccggttcatatgtcgcaaaacatcggcaattaatatcattggatggatcaccgctttgtcccggcgcttctgctgttacatgaataccatttttattgatgccaagatcaaacaactgattgaccatgcgttcctgcccttctaaatggacatgatccgcatgttttgtctcacggactctttcatcgccaacgttgtgccaggtctttttcatgttgatgccccgtgactgagcttttttagcagcgtcaagcgttgctttttcccttgtgcgatgcatttctgtattggctatgcgcttcgatcggttgtaactcaggccgacatctgtctgcagctccttcgctatctgagcaaagcgtttccgctcaataaaaccgcgttcgattgtcttgttaatctgctgtattgtctttttgcgatcagtttcaatggctttgtccatttgtttacttttaatagcctgctgaacgtctccgggagcccattcagcaggtaaattcatctgattcagtgttgcttttggctgcgcaagtttgatccctaacgcagccagaacgccaaatatcagccagctgtaagatgattcgtaggtttcttcaaggaattctataatcatagctttgactttcgctgaaagatcactaatcaacgaggtgatttcccgctttatacggtttagatcaccgtgtcgattagcgtcagcaagtgtcggttcttcgatttgatcaagcttgacgaataacgcagtcagctttgacagcacctcttttgaagcacgctgaaaaagccgcttgagtttccgtaagaattccttagttttacggttcaacggcttcaaaagctctttttcagtttgttctttatccaccgcttaccctcctactcctcggctgtttctttggcgtcagactcttgtgtgtcctcggcttcttttttatttgtgcccttgtccagcttatatccaagtcccttataaattacctcgaaagcacgttccgtcacttccaaagagtctctccccttcttgatcctaaccattaggcagtggcacctccatcaacagcagggactaaggctgcaaaggcatcctctgcaagagtagtgaatccgacttccatagttgctcgaagtgcgaacatgtcacgctcgaataagtttagaggttcgccggcttcatctacagttgttgtcaacgttgcatcctgagaaatggtatattcaatgtcctgaagaataccataacgcgcatagtcccaagcccctgtaataaggtcagcttttgttttatcccatgatttgctgtcaacaaacccaataggcaacccaagagcttgaggtgttgcatctgctgtcacttggttaaatagtggcagcccgttattatcttttgcagcgcgtaacttttgacggaaacgtctaatagttgtaaatgcatcaggatctttgtctgcatcttctacaagcgccattactgcagcgagatcgtcataaacagttgcccctgaacccgcgccagtaccagatgtgatcttttggccggacttgttgactctttccatgattgatacacctgtctcaaaaggcgatcccaccccaaacagtgcggcttggtcaaacttgattgcaaaagcttctctaatagctgattgcatttgagtaaagaagtcagcaactgtgtagcgtaagaattcttttgaaactggaatgataaccgcaagtttcttcgatgtcatttttgctgtgagccatttggcgctgcttgtttgaatgcgttcaccttcaccaacccagtaagcgccaggtccttctgctaagtacgtgaatgtctttaccggttttgtcatcggttcatatttagcaagctgtgtgattgcagatgtctgcataaattctttcaacacaatttctgcttgttcttctgggattttcccagttactgcatcttgtagtaatactgttttgggattaaatgttggcataatagccctccttattttctgatatttgcttggttagcgagtgccccaatatcaaccgccccgccagctggtgttggatcacctttttcgaagttagtgccgctctctttgaatttgatatctacagcattttgaactgctgcattgaatgtctcttcaaacttactgagattggcaagtgttgtttcctcgtcttcgccaataaaatagtcaataactcctttaggcagcttcttttcatccgctacattcaaggctttattgaccaatgcttcacgatttcttgctttttctgcatcttctatttgttttttgagcttctcaatttctaattcagccggagatttatccggattgcgttcacgaattttctcttcaacgatgctatccaaattgtttgccttccatgttgcaagaccttttgtgaagtaggaatccaggcgtggctgaatgaatcgttttccctcttcagtttcaaggaacccttccaccttatctgctgatacggccgaaagttctcccacaaatgcttttacttgttcattgtctttattatcttcgagaaattttttcacttcttctaaagttggcattacgtttcttcctccttcgccctctacagtacgcgcctgttatgagtgcatgaaaaataagcctttttaaagtcatgctcaggacaaatacagatgatcactttgcaacctctttgaagtcatcctcatgtcgattcttatgccagtttctcgttgtattgtattcatttttcgctaattcccattgccatatatctatttcagcaggcggattctctccatttgacaacgcaattgctttctccatagctttttcgaatgtagggtagattcctaccttatggggatagcagtcataataatcatcactcgtgtactcaacttcaaagaacgtcattacttacacctcgaatgtcatcattgtccttttcatcctcaaaatcataagcatcttgttcagctttcattctctcaatctcgtattgcacatcatcgacaatagagagtgttgaaaggcgtgtctcttcgcttacctgacctttaagttgtccggatgtctgagcctcttccaagagatttgacggcagattgcgcttgaatgagaaccatacctttaaataatcacctgctgatacaagaccttttttcgcccatgctgagcaaagcaatttgtactgataccgaagggcagcagtcgttttcctctccatcgtgatgcacttattttcaagggccatcagcttgtatttcattgcaacgcctgtcacattcccgccgaatgattcatcagagaaattgaccgactttgcaaaacgaagaatgttttcttcaagcctgttcagatggttttcgatcatggtgtcattaatgtcttttgtcaggaatttggcatcatcatctttcccaaacatttcaagcacaccggtctttttcagttcttggatgtcttcatcatccataccagcgccctttaaaatcaaataagctagccgtagctgttcaatctcgtttgatgcatctgaaagtgtgcgatcgtatgcatctataagtttaattaccttttccacgtcgcccatctgttcatcattgttaggcaacccgaataaaggacaataatcaaacaagtggagcttcttctctaataaagtccagccacctttttgtttttcgaaaaaataggccatcttgtcatcgtaaaaagtggctttttcacgctctatgctttgattattgacccaatcaaataccttataatatctaagtgcgaaagaaggctctgtgatgtcattctcagcaataatgacaacttcccatggatttacattcgcaactcttaccgagccgtcaggagcgatatacacaagtctagcaccatatccacaaatagctgctttcttaccccattcgctatcagcatcagcaatgttatttatggtgttaaagttattgatttgctctgccaaggccgtatttttgttttccccgtctttctccgtctcgtatgagattggatggccgaacatatacccaacctttgtatccactatctcagcatcaaaagcattattcaggcggttgtttaccagatggtcaatacgccgaacctttcctgtttcaaaatcatcgaattgagctgcctcccgctgtaagatcggcacaccggcaacactagccatatatcgttcatactgagctatggctttatctttgatcggcttatgctcttcaataatctgttcaatgattggaccgtctatctcattatttcgaagataatttaaaaacttgttcatgttctcacccctttcctttgcgtctcataggtttgttgtgtgtataaatggcatatcggatagagtcgagcacatcgtcccactctttaactggctcgcctgtatttggattccaaacatacataaagatctcttttttaaagcgactaactttatcttcaacaataaaaagcagatcccgtttgaacagccgcgccacttcttcgatacctgaaacaactgccttatcagcatctaacgcacgcaacttctctctgcgaaaacgtacgatgtgttcaggccgagctgtatcacaatagaaattaatgttgccgtaccgctctttgatgtctttcgctaccttcacccagtagtcaatctcttcgtgccgcttgcaatgttcttcaagcaaataaaaacacccttggtcatcttgtccgattacgacaatagaacccgggtgatcatatccccagtcaacaccagtaaagtatttagtgaagttgacttgtttatcttccatttctttagaactgatatagtgcttgtctttgttaaaatccttgtatattacgccttccggagcaacccagtagccgtaaatatccctgtccgtaaacatgccgctcggtgttgaagcaacaatactttcgacatactcaggatcaagaaagttgttatcaaacaatgagaagtgaaaagaacggatattcagcctgccgtttttcagccgctgcccgtctttgtcgatataatccgttttgacggtgtgcattgggttttcagggtttgtatccatcatgaccattgcacccttataggagcaacgagaaatgacttccttcacgaatgaatcatgcagggcagtcgcttcgtttaggaatgcgccagctgatgtgaaaccccgtgcctttttccatgagtctgcatttgcaccatcaaagcaataaacacggtttccgaatatctcaacggcattcgctttatcaaggcgcaattcttttccaaggatcagttctaaatcatttaggatattccgctttatagaagcctgagttgccccgccaatgataaaagaaagccccatgttttgatatttgctgatgtgcccgaggaacgtcaaaaggagcacgaatgttttccctgcccttttcgccccgctgcatattaagattttcggctgctcttcaataaagctgttccatacttcttgttgcttagagttaagttccatgaggtttcaccatcttccgaagcatggcagcaacttcattttcttgagagtttccgttatcaccatcaatatctttcttcgccttctcgatattcaagcgcatttgctccaatttaaggcgacgttcgtcttcttcatgcgccagtagaacaaactgttttatcaagcttctgagctctcccattgcccgagattgagcattcaggaatgtggcctgacgatcccaagcgaactgtatttcaagttcttcctcaacaatagacttttcaaaatactcgtttccatcttcgtcctcttgaggttgataaacgtattttgcttttttctgttcttttacaagatcatctttatcttgtacgaacatgataggctgcgcccgaataatggctgcatattgaatctgtatctgatcccatataatatcagcaggcgaccgttcctgaatctcttccatgatttcaagcgtttcttctggcaggaatttagagaaaaagccgtgagtcatagcgttttgattcctctgtggtgcgccgccgttattccctaatgcattcttattgccgggtggtgcgcctgccttttttgtgtgcacacttttttcagtgggtgcacccttttttctttcccaaccatgccgctgtttccacgattttatggtgttcactgacaccccgtatttctcggcaaggtccttgtatttcatacctttgacgtaatctttctgcgcctgaatgtgcttctcagccatctacattcaccgccgcccccttttgaattgagttgttttggaaaaaatattccctctaaaccaccaccgtgctcaagccgttaaccgccaattgtctatcctgagacttaccggaagcagtttacagagaacataaaaaagagccatatagtttaatggctcttcctttattcaacaatttcaatatgtgtaatttgagttgggttaataagaatagattcaccaagatcaatcagacgatttttcaaaactctttcaccatccaattcatcatgaaaatagtctataagattttccacatctttcatatcttcataagaaatttcaaaagattttttattactcattagtataaacactttcataattttcacctcccacctaattatcggataaggagtgtgacaagggaactatttgcaaaatttgtcgaacgaaagcgcccttcataaataggtggcagtcgtaagacaaaaaaagcatccccaagggatgccttatttaatcaaatctcttaattctttaattgtatggaaccattcgcaaaatttgtcgaacaaagacaaaagaatatcactttttgtttcttttttttcggttgttttttgtctgtgtttctatttgcacactttcagtttttttgtttttcttctcttcagtttctaattcttcaattgcttcttctaatagcattttataagtacgtagttttccataataattaagattttttgtcacaatccatatccagagaccgattaaaattaataataaaatcccgttaaatattactatataccttccgaaggttaaacccgttttcacaatagtatctaaaagttctgtcggatctatagaatgttttttatcaatatttactgctatgttggagaaagcattaaaagtgttaaaataaaacgtaaaaatacctattagaacactgatgagactcgtaaatagtgatgtatatatagcaaatgggatagttttaaaagaggaaatgtctcctgaaactttaaggctgttattcaatctggaaattaatttttttatttgttttggttctagtttctttttgactttctttttaaaatcttctccacttttaatattggaatcctttttataaggtgtaccgaaatgctctaagtatttagatacatgagttacttcgtcaaacggaatttctctaatttcacgattatctttttttcgataattaaacacttttctccataattcaaccgctaattttttcactatatcacctcctatattttatcggacagacgacaaaacttcgaattgcttgcaaaatttgtcgaacgaaagctctattcaaaaagtcagtcttaagacaaaaaaagcacccttcagctgcgggtgctcatttcttcctatgcttctggaattccaatatatcctctttaataaaaagcctgtccctcggcatttctttaaccggttcaagttgaccggttttaattagctgattgagatattgacgagtaaagcccaatatttcaatcgcttcacttgtattaacgatctcctcattcaagaactttttaattgcatcacgctctttaaggctgtacaccaagcatcatcctcttttttctcgatatttttgataaagggaaattgacttttccacaattgaaacagcaaacaaaacaattatgcatatatctaaagttgtctttaatggactggctgcgacatgctgtcgaacaaataacatgtatcccaaagcaagaaggacaaaaatatcagttgacattcttagtttttccatttgtttgaaagtggctgctttcatcgttatataattatttgtgtcacttatgttatacttggagcaagggagaagctccaccttctccctcggctcaaaatcatctacgctttcttggtcgtctgcgtcttttgattttgggcttttttgttttaagcttttctcttatgataagagctttttcaaagatagtgagtgctgtaagtatgatgcccagtatcactgcaattttagccactttcgttcccccctttctatactttaattatatacgattactttactcacgtcaagttaatttagagaattttttcctgttttctcataaaaaacacctattcatgctaaacagaataggctgtgttctgctctatttttcattttcaaacgggaacgctcaatgtttttctggactgttccttttttaatgttcagcagctgggcgatctcctcgaaagacatgttttgcacagtatgcatgatgaaaatgtccttctctctttcagtaaggacagaaagggcatcagcaattctttctttgtcccagtcgcttacctctccttctggctcctgattgatcgcatactcttctggcattgcatcaatgatacgaggatcagcaagaatcgttctttgataaacgtctcttctgtcagctccccggcgtgctcccggttgtctcccgttctgcagccattcgagagtgaattcaatatcgctaatcatactgccaatgattttcttatcattcttttgttccgctgtcatttcattttctggtgtttctgagaatgcccggtacatctttctcgcttcttttaacgctcttttgtattcaatgattaaatcctgcatgtttgtcctcctcttatttacgcttaaaagcgccgcctttgcatcttctgagtgtttgcctgtctcgcctgccaaaacctttcagaacgctccttcgcgtttttactggactttttcttctcttgtttcatttcgtccctccgttcaaataaaaaaacggacaccaaccaaagtacagaattctctgtacagtgatcagtgtccgcaggctttccatcttggactttatttaaattaaatgttttttcgctatagtaaataatggcatagctatatcaaataaattcttctcaccaacttttttatagactactatatttccatccttcgttaacaagacacttagaatatcatcttcgttttctattggattcggcacatctaaacgcaaagcagaaataattccatcactttcttcataagaactccaattttgactcgcggtaacagtacccccacctaaataggcaacttctacatcggctatttttaaatctctccaccaaccaccttttattgcagcattatcattttcttctaattcttcttttagttttcttaaatctatagttatagcttgtgagttatatcggttatccccacgtcccacagtcccatcgattaatcgcttaatcccgtgttcaataattgattttttggaaccccaaaaatataaaaaatcatcatctgatttagccacattgaaagtttcatcagcagaaatagcaattatatcgtgtgccgttccatcttccaaatagccttttcctgtaaatgaatctcctattggatgtattacttgatacttttttaaatcttcttctgtatattcagtactacctaggtttttaagcgtagttttaaaagattgactttcagaaccagtattaaattcatttgtttctaatggtaattgttctgggaaattgattaatctctgcataataattgattgcggcatttaattctctcctcacaaaatcaatttaattactttgtccaaagctttaattaaagatgttctttgatttgtcaccaaaactatattcttttcatgcgcacttaactgtacaccaggattacttttaattttaatattaaaagataatatatcagatggcttaacctctttaataaagtgttttttcatgaagtcaacttttttagtgtttttagcaactttcattgtatacttattctcttccacccctaaatcatcacaaatcctctggtaaaagtgaactataaaatcttcaataatttcttgtccatttttatactttaaagtagcagatgcacttacattcaaattcatctgaccaaaattatctgtttggataatcgagaaataaatcttgtatggtttaatgtacattttaacgttgttaaacttatcaaaagagacttcgactaactcatttttgcgccctgtatgacctttattttttagtaaatcataaaaaattgtttggacttccgtataatcatctttaattttttgtagagttgaattttcgactatgttaaaaaccgcttgaaaatctatatcaaaattatcgaaattaaagtgatttttcacccatctaaaacccactctaaatttttgggatttgtcatatatagttttaagtaaagctgctaatgttggtaaaataatgattcctgttgcccaattaaatccttttgtgtaaaactgaaaaagcattgttgcaagaagactgagtagcattaaaacccacatcatctagcccccttatctaataatgtcattaattatagccataagatattgcttggtaaacattctttagaattaaatcaatcaacttcctctgtctaatttacaacaatgtttatcttttccacagttttcagtacaataataccatttattttcatattttttctaatttttttcaccctttttcacccctccatcgttttttcttttttgatgaattattttcaaatctctatttcctcctcaactcaacgcccatgctgcagccgcatttcgggcagcgtgcatctgggcggatttttatatctaattcgttgtgaccacattcaggacagctgtattcgatcatggtgtcaccccctattcccagccgactgcaattgcaaagaataaaaccaaaaccatcgccccgattagccagccatttgtcttatcacgctttgcaatgattgtttcatcaccgatcattttcaaatcgtctgactttgccacgagaactggtatgtaatctggatgcactttcaaatattccgccgcctgctcaactgtcatcgcttcgtctttcgtggctttgactgcccgctgaagctcaacttgtaaaggaatcatttcgcatcaccttctttcccaagcgaatcccaatcaaacgtttcaagaatcttaagcaaccgttcaacttttggtgctctccaagctgtcatagcgtacgtatgagcttctgaagtgtaatggtgcttgttcaatttgatgtggctctttgcttctgcttttgtcaaaaacattgtatttggttgtataatgtgaacctttctttctggaattaattctgcttcttcatcaatgtatttttgaatccactcaacagcatcttcatagtcgtcctcaatttcttgcaactctgttaaggcttccttagacagctcactatcttcttttatttcttctagataatcatcaaaaacataggcttctgcaatatatggcaggtatacagaataacgctctgcgttttcctcccgagcttcaacccattcataatcaccgactgtccaaaaccgtggtgcagcttgagaatcacgatcctgtgttttcaattcattttgaagctctttcaaaaattgaatatccttgttcatttcacatcaccctccaattcattttgggcaactgttatcgcgaaattgagattggtaatgatcttctctaatgcctgtttgtatcgtttcctatccccgcttaaatgctgaatgtccttttgagcctgccggaattgatgaaccgttacttcctgctggcgtttgttttcctcgatgatttcccgctgtttttctactgattgaattagaaattcttgatcctcaagaatagtggaccaattaacatcaattttctttttataaagtgaagttgctattgaaaatctattttttatttcctgtaatttatccatgccgttcctcccccgcaggggaaagcccctgctatttgattttgaaacctatttcgtgatcgactcgagcaaagcttccctttgccgtttgaatgattgttttgccatgctccggggcttccaagacatgtgcggtgccctggctcccgtctaaaacgatgatctgtattttgcccgactccattgcctgttcgattgttgtatctttgcttaaattaatttctcttgggttgtacattcttagcgccccctgtgctatgatagaagtaccagttcatatcagagcatcggggcatacgcttcggtgctttttttgtgtttaatagtgatccggtttccatccagtcattgtgaatgttggcgatggtttcagatcctcacggtaaacgatcgggtgttttttcacgtattcggccagctgttccggcgtcatcttccattcttcaaccggtcctggcaggtaaggattgatgctttgctgttccatggtatctacctcctgaattgattttgggaatttccgtgccgccgagcttcttgcaatcagaacccattcggctggcgcatgccttaaactgagagcaacgtgtcatacaggccatgagcttatcttcttcctgcacccacaacggccgatcgtctgcgattaccacgtttagcagtggactttcccgcctttcttttgagttttttcagctcgtccagctcgatgaagccgagtgacttatccagagccagcaccttgagtggcgtatcgtaaagccgctcatacagcttgcgcttgatggcaaattcctttgtttcaacgcccttgatgtcaatgatctcgatgctgccgtccaagttatgaacctcaaagtctgcaatatattcaatcttccgaaaagttttgccgttctttttgaatgcctcttgcagcaggaaccgtggctgcagcttaaaatctttgatctgcttgctcaccttgagccatttcagctgctcatagtatttggcttcggcccggctgtcgaacgtgatgccgtctacctgtgtttttcttgcgccgtacttatttgctggcatgtgatgcctcctgaaacttattcttttgttctgcaatctccatttctgacatgccgcagtcaatacaacattcatagtcaggtatttgcaaatgaccttctcccggcatagtgcagtaactcatttccatgtgtttatgttcacaggattcctgacgttttttctgttcagcctctttgacaaccgagcagtattctctttcgtgcaacctagcaccgtgctttgtcatcagccgctttccgcaatgttcacactggtaaagcgtctgattttctaacactttcattctccttacctcccgtcactctcttcccattgctgaatctgcttttcttttgctggcgccgttagtatgattgccggcagcagcatcaccgctttaagcactcggcatcagctccatttgtctgatcttttcctcaagcacctggatagctggtgtgaggtccttgccgcccttttgttcagcaggcccgaacaaatacattcctttggatcctataacgttcgttttctcgttcaatcccaatcacccaatctatgatttaattccatccggttgccctgaatgatcaccgtgtaatacttgcacatctggtaaatccgagagcccagcgcctcgtcaacgtccagcagatcgtccgttgtgagctcagaagagatcagcagaggtttatggttcaggtagcgataattcacaactgactggatctgttcgacttgccattcagttgcccttggcttcccgtcaactggcttgaataagtcatcaatgaacagcacatctgcttttctcatggcgttcagctttgtttccagctggtcaaagtcatttttcagatcactcatgccctcaacgtaagggaagtacaggcagtgagttgatttcttcttaatgagattgttcatgatggccgttaacagatgggttttgccgctgcccggctgtcccagcagagcaatgctattggcacgctctcccttgatcttttcaaagtctttgaagtattcgaccgcacattcataggcatctttaatcatttgaggtttgccatctaatttgaagttgccaaacaacagcttttcgaacttttctgtaatgccgctggctgccatgagcttcgctattttcttttgtttcacacactcacattgtttggaatacgtcgttttccattcccgagccttatccggcgtgcaaacctttcctgcaaggtaatcatcttcaagaaccatttcatcaagtgataggctgtccaatggcttgtgttcttttctcaaccgcagctcagtgtctttgtggatgcggtagatcacaacgccgcgatccttgcactcagagcattcatattcaaccttttcttctgattcggcctgttctgtttcccaggaacgcgatcttgcttgaagacccttcatcattgcttggaacgctgtgtctatactgactgctttgtttattgccatactgttgtttctcctttctcttttggcttaatgggttggacaggatcgcctcaatgtagttcaagccaacgttgctgcctttatttctgaaagcctttttcattgcctcgatgaccttctcttcgccgtaatcatccaccatgtagccgattctttgcgcctcaatggagccgatagaacgagcgaccttattttcgaatagctcaaaagcgtttttcatttttggatcaacctcctgcgtttcttgtggtgctggtgcaagttcaggaacaggcttttcagatggttcctgctccgttacaggcgtttcaaatgagatcagcctgtattgccctgccttcctcccctgcggcttatattcaattcttttaagatcaatcagcatctttcggtgtttgatcaacgtattttcggaaatctcaatctttgcttgcagagtggtatttgaagtggtgaaccactctcgccaccctgccttattgttgatgtgcaaaagatgaaaccataatgcttgagttgtagcagacaacggattcgtttctagccaattcatgaagccgttcatttctttcaggtagttcatggctcacctacttcctttcacacagtgctgtcattccgctgatacggactaaacgtaagccaggttcatttgttctgagatagccttcaacataagcacggaacagctgcgcgcgatttggcgccccttccgtcagccatttgtaacagaaggggatgccgactttaatcaaatgggaggtcatcttcgctgatgtctacaggcttgccgtcaaaaggatcagcgtcctgcgcgcttggtttttcctcagatggttcggcatcaatgatttctggctcagacatttcgtcagtgatgtcaatgcgctctcgttcctcgttatcctcaataactgccttttgcatttcaacagagagtatcccccacttgctgagcatggattttagaacggttttgagtgccatcgcatcccagtccttgccccaaccgaagtccgacttgctaaatttctttttgtgtttctcaacttgcgcctttgtccaatagacagtttttcggaatccatttaaaagctcaaaataagcagcgtaaccaataaccgaatctgattcccgcttttcaaaatcaatatcaatttcctcggtcaacggattccacttttgcaattctccttcatgaaccggtatgcaattgatagatttatattggcccgtccgcaaagcaagctgaatgtatcctttgtaaccaagctgaaattgcgcacggcctttatacggaacgatccaggcataacctaagttcttatccactggcaaatcgagcgttgccgccaccatagccgatgaaattacactcatagggtctgccttttgaagcgtattttcactgttgtacaggctcagaattgacgctgtgaattgagacgctctttttcccagaacttcttcgaatcgattcatgactgctggagaagaaagcaggcccttcatcgttgttccctgctgttgtcctggggcactgttttgtttcttctgaatgctgtttttaagcgtttgatttgtagccatattcagctaacctccttaattccaaagcgcctgaattgcacttcttttgtgactttctcgtatacatctggaaactgctctttcaatttcttgctatcgatccgattagttgaaactgacttccagctagtttgatagtttccgatgaatccatattctgcttccttcatttcatgtttgatctggttttctaattcctttgcctgcaatgacagctcgttgatctgctctttcagctgtaaatactgctgaatacgtgttttattatcagatgtgagatcaacgactttgccgccttctgcttcggcataacgttgcttgagatattcttctgcagcactcgaaccgtcaagaaccggagcctttccgcccaagaccttttcattccaaaattcaatttcggcctgaaagatcattgcaataagctcgtcatcgcgctcaatctctttccaaacgaatttattgccgccgatcagtacagcaaaatatgcttttttatattcaggccccagcactcctagatagtgttggacctgaacaatatagctgtcaggaatctcgtcatcttcccactctttcaggttgtatgccgatgtggttttgcactccaaaatggctttttcgccaacaatcattcgatcaacgtttgccaatataaaaccgtgcttaggatgcctgagcattgcttttctccgccttacttttttgccgctacgtatctcaaactcttttgcaacgatatcttcaaggagtgaaccgaagtaggctgcctcacttcctgattcactcacaggtacttgacctgttttgtctaaccataattcaaacggtgttcgccatttgtttatgcctaaaattacagaagcatctgaaccgccgatgcctttccgtcgctcaagaagccattcgtcccgactcatgtccgctgtcgaagcgaaaacctctgcttgcatcagagcagccccacctttcttttgtaagcttccgcaccaagccgctgccattcccggtagtgatccattgaaggaaaactaaactgcgctttaccgtttttggcgaatacaattgaaccgccgacctgtctcaaacgttgctgatcctccgcacgctcgctgaacgccactttaactgctttagccatgtataaaacctccattgattttcttgaggctatctggtagaatattgatatatgagttttcagatagcctttaattaagtccactctgccaagtgggcttttttattgctcatttttaaattcaaaaccaagatgctcctttaagtaccgctcaaggttttccctcaagatgacttcaccctcagcgctatctatcacgtaatcgtcgaaaggcgttacttcatccccgaaaaaatcctttggtgtttctggctcagtcagcttgtcgtgccaattgtttagaatcatcgggttttcgatcgtcattcatattctcctttctgtaattagctatgcgttcatcccaaatcagataaagttcgctatgatttcggattctttcacaccatgctctgacctccaacgctgtcgctggtttatgaacaaagtgaaccatcatcctaagctcctgcgtaccactgataaatcaattccacgctgtttcagcctcatcgctgcatcatataagcatcccttatttgaaatccgtttaagatcctcaatgtttgctttgatactgccaaggatgtctaaagcttcctcgtagtcgccttctttcaaagagtccagtaatagttcagccaaactttcaactgaatctgatttccgttttacgacttcttcatctgacttcaaaaaatggttgagtttcatacgagcatcgccttcctttcctcttgttttgacatagcaacttgatccattaacgctttccgcgtccatttgtctgcaagctcctgcattttcagaccatgacttcgagataaagcataaaagagagtgtctacagctggaccaaggtcaagaatctctttaagatccgccatcggtagcgcctcaatacggccggggcgttcattcgccaaccagagcgcgatattttcagcagcctcaagggattcctttgtctgtttcataaaattgatcagggctttactggggctgacgttcaacgccggatcgactggggctgttgccctcggatgaagccggaacaagtaatgtacaaggtcaatgtgctcataagcgccgcatatctcaaaccatttgatgcaaagttcaggcgttagtgtggtcaggccattttcaacgtctgatacataccgttgatctttgccgccaagtaactgccctaattgaaattgagtaaatcccattgtctttctaacctctctcataatttttggtaaattatcgagtttatacgggttgttcgacatatgttcgcctcctgtttcacggggaattatttggtaaaatttaagtaatgaaggaactagctggcttgctgttttttcagcttattgatgatgaaggcttgtcccttcggagtgatgcgcattgtcagccaggatttcggcgtcccgtttacttggcgcaccccctgtgcgatctcaaagaaacctcgctcgatgtattcctggtatggctcattcttgttggccatgatcatcttccattcgcgcagcttctgaaacagtcgcttttcaccaatcatgatgccgtttttcgaagcaagctttgccagttctctcacaagcaatgatttttcggccgccatgcaactctgtgcaaagttgaccaatggttcctgaatcttcaatgcttgttcaagttgctgccgttcttcctgctcgctgatccatcgctttgcccggctgactggatcttcgatcatgtaggacggttgagtcattttttgaagctcggcttccatccggttaaattcagcaatgtatttttctttgaacactgctgcttttgcacccgtataaccaaaaaccaaaaatgcgagtccatcacgtttgatcagatattttttcaatgatcgtcctgttggatcttcatattcactcaacgaaaaatttcgttcagtaaaatctttagagcaattcagtgtttcaatgctttttattacatcggcgtgtcgttttccgaatacctcagccactgttaggctgtctgttacggcttggttgccttcaataaaaacaatttgattcatgctgttacctccttgcttgtccaccaaaaaaaggtgaagcagataattaagcgtgaagccttaattcttttttagaagtgaagtacggctcaagagctttacggaaacactcttctctgtccatcgttccgtaatattctttgcccatcttgatgtttgttgtttttttcttagtttgtttcgccatgtgatcacctcacgtcagtgtattcgtgttggacggttggactaaccaagaaattaagcagattcaagatccccattcttcatttcgtggcattcttcttcaaaaaaaagagtccaatcaaaatctaaaatgtttgcgatcttttttgcgacatgaggtctgacattcctttcgccagtctcaatggcaccataagttgatcttgcaatgccaactttgatggcaagttgttcttgcgttaaattggcatcttcacgtttttttctgagccagtatttcaattaggatgcctcctttcgttctacatatcgtggcttatgaatacatattaaaccacgatatgtagaatgtcaaacctttttattaaaaaacacgtaatattttcttcatttcgtggcatgtcgtttaattccacaaaatgtagagttataatgaatttagaatttacctttaaaagttagtaggtgatattatggcgattaaacataggctagtcgaattgaggaaaaagcaagggcctcatgtgaagcaagaagatgtggctaaagctttaggtatagcacgctccacttacggtgcttatgaacaagggaaacgcgaaccggaccacgctactctaataaagatagctgattattatggagtgactatagattacctactaagagatgagccagagaatatgaaaaatgaaatcttcaacgaacaagcaagaaagattcttgaagatcctgatactctggtagctgctgctgatggaaagataacagcttcaattttagaggcagctcaaagaattattgctgagcaattaaaatcaggtagacaacccggagatataaaaaacgggaacaaaaaataattacataacgatcgctttatctttatttattattattgtttagtttagtttagtttaattaatgctgaacacttcgcctcaaaatttgaggtaaactattcagttgaaaccatttcaacctcaatttttgaggtgatccatgaggttatttctgcattcaaccgcaaattttgaggtaaaacattcagggtttttcactcagattttagagagaaaaagtaaaaaaatcctttatttagacgatacaaagaaagagattgcacttcattataaaaggggaaattacaattgaaaaaatggttattaggtattggagcattgactcttagtttttctttagctgcatgtagttctgactcttcaagtagtaatgaaaaatcttcttcaagcaagacaagctcacttagtgctgaggaccagtttaaaaaagatgcaaaatcatatgcctatgaaaaagtaaatagcgccggcattaagaaagggacaaaaattgtcattgaaggcgatgttacttatgcagataacgtcaatgatgatggggatacagtttctaaaaatgttgagtttactgtaagtaaaaatagcgatggatctgaagtttacacagtaagcaataaaagcgctgataagttcaaactaaacgatacggttaaaatttatggtacatatgaaggcagagctgaaggaagtgcccttcctaaagtgaaagccgtttacgtcgataaaattgataaagaaaaagagcaagctaaacaagatgctgcactaaaagaacagtttgaaaaaactggcgaaggtgatattgaaggactgggccacgttaaagatatcggcgttggatataacgacgaagtcggaattgacggtaaagacactcctataaaacctgttacgatgggcagcatgaagctttatattaacagtgtcgacgttctcgaaattcaaccagatgatgatgcaaaatcactttattttaatgatcaagataaggttcgggctattgttgtcgatatgaaggccgaaaacacttcttctaaggacgtaacgtttgaccctaaccaagctgttattgttacaaatacaggagaacagcttgaatctgaaatgggattaatgggtgaagtaggcggagacttcttagggaaagttaaaaaagaaggccaggcatggtggatacttaaagataattcaaaagatatcactagtttgaaaatgattatttctcctccaagtgatgcaaaaacctatgatgatttaggaagcgagaaaagactagattttgatatcttgagttttgaagaagctaagaaaaaagattcaaattaaattgagcccctaaagggggcttttcttttcgctaaaaagagaacatacgtttgttcgccttcgacaaaataggtgataagatacaataaagcccatgataaaagtcacatctttggttatttaagggaggtttcatctttgagatacactaacagccatttagaagattggattgaacagctttacagggagatcaatattacaaagccacatgagattaattttgatagaattgctcaggccttggacatcttaattgtttacaatccggaaacgagttttgctctgcgattcaacggcatgtatacaatttctttagattcacgaaagacacgacaggaacagtggctggattttgctcatgaggtttgccatgattttagacacatgaacgatgataagatcatgcccgcttcgtggaaacgttatttagagtaccaggccaattattttgcttatcacttttgtatacctactttcatgctccgagcaatggacatcccccgtaatctatacgacgcagttcaagtcattgccgatgccttcaaggttccagagtcatttgcgatgacccgcatcaatatgtacttcaataaaaaacgactcatcatataaaaaagagcctctaaagggctctaagtttgcgaccggtatgcataccatttgaaatatggtttcgaacggttttctcactgataaatagctcgcttgcaatctcctttgttgtcttatcttgaacgagcaattcgaacacttctctttctcttttcgttagcagcggcttcgattgaaattctttctccttcaagtattgtaaccctccttgctaaggtgagagcgaatcagaaacgaatgggttttgatatagtcgagatatcatatgtaagaagggcgcaggaggtgacgtttacaagataattagtttatcgtgtatgaagaagcgtttctttctcctcatctgtccagctgacagctttgccgctttcctttgagacttgaaccatcacgactgccccggtgaagcagggttcgccttcgaggttctctccgagatagtgcaaggtaagagatgaactgccgactgcgcttgttttcacatagatgcgcaactcttcataaggcatgacttggcgcaaataatcgcattgctggcttgccacgactgtcatggtctgtttgttttcactcatcatattcagctttttaaaataagaaatccgcgcctcctcaaaatatataaaaggggttacattattcatatgcccaaacatgtctgtctcggaaaatcttacggatacctcattgaaaaaagaaaaggatgttttccattcttgaaacggcatatcaatataagcgggaagcttcatcttttttcatctccttattgtttaaaaaaacctctcccatgcggaagaggttttttcttcttatactctgtcgcttccgaagaaattgcggaacgcttgtaagtttgtatctctattcaaggctgcaatcgaagtggtaagcggaatccccttcggacaggattgaacacagttttgcgagttaccgcaatctgcaaggccgccttcatccattaatgcttctaatcgttcagatttattcatggcgcctgtcggatgcgcgttaaacaggcggacttgcgacatcggtgcaggccccatgaacttcgatttgctgttcacattcgggcaagcttcgaggcagacgccgcatgtcatgcattttgataattcatatgcccattgacggcgtttttctggcattctcggccccggtcctaaatcgtacgtaccatcaatcggtatccatgctttaacttttttcaatgaatcaaacattctgctgcgatcaacctgcaaatcacgaacgactgggaatgttttcattggttttaaacggatcggctgttcaagctggtcaataagcgccgtgcaagactggcggggttttccgtttatgaccattgaacatgcgccgcatacttcctcaagacagttcatatcccatgtgacaggggttgtcttctcacctttgacattaaccggattccggcggatttccatcagagcggaaatgacgttcagattcgggcggtatggaatctcaaattcttcatcataaggcgtgctgtcagctgtatcttgacgtgtgataataaatcgtatggttttttgttcactcatgattatttcgccaccttcttcttcgagtaatcccgtttccgaggcgttatcagtgatacatcgacatcctgatactcaaattccggcgcttcatacgggcttacatgtttagccattgttgttttgagccattcatcatcattacgttcaggataatccggtttataatgggcgccccggctttcattacggttgtatgcgccaagggtaatcaccctagcaagctgaagcatgtttgagaactggcgtgtgaacatcgctccctggttgctccattttgtcgtgtcattgatgttgatctttttgaagcgctccattaactcctgaattttgtcatccgttttcaaaagcttgtcattatggcggacaaccgttacgttcgccgtcatccactcaccgagctctttgtgaagaacataggcattttcggttccgtccatactcataatatcagcccatttttcttcttctttcttaacgtgagcgtcgaataaagatgaagacatgtcttccgctgaagattctaagccgtttacatatttcaccgcattcggaccggccaccatgcctccgtaaatcgcagacagcagggagttcgctcccaagcggttgccgccgtgcatagaataatcacattccccagccgcaaacagtccagggatgtttgtcatttgatcgtaatctacccataaaccgcccatagaataatggaccgccgggaagattttcattgggagcttacgcgggtcgtctcccatgaatttctcataaatctcaatgatgccgccaagcttaatatcaagctctttcggatctttatgagacagatcgagatataccatgttttcaccgttaatgccgagcttctggttcacacacacatcaaatatttcgcgtgtcgcaatatcacgcggcaccaggtttccgtatgccggatatttttcctccaggaaataccatggtttgccgtctttatatgtccacacgcgcccgccttcaccacgcgctgattcactcatcagtcttaatttgtcatcgcccggtatggctgtcgggtggatttgaatgaattctccgtttgcataatacgctccctgctgataaacgattgatgcagcagatcctgtattaatcatggagttcgttgattttccaaagatgattcccggtccgcccgtcgccataatgacagcgtctgaacggaaggattcaatttgcatgtttgtcaggttttgtgcaacaattccacggcaggttctgtcatcatctaaaacagcgccaaggaattcccagccttcgtattttgtgaccagacccgcaacttcgtatctgcgcacttgctcgtccagtgcgtaaagcagctgctgtcccgtcgtcgcaccagcataagcagttctgtggtgctgtgtacccccgaatcggcggaaatcaagcaggccttcaggcgtccggttaaacatgacgcccatccggtctaataagtggatgattgaaggcgccgcttcacacatcgccttgaccggcggctggttggcaagaaagtctcccccgtataccgtgtcatcaaaatgttcccacggagagtcaccttccccttttgtattgaccgctccgtttatgccgccttgcgcacaaaccgaatgagaacgtttgacaggaacgatggaaaacaacttaaccgccattcctgattccgctgctttaattgtcgccatgaggccggcaagacccccgccgactacgataatgcttgattgactcatgatagcccctctccctctagtaatctagtactcttaaacaaatgcgaaaatcgcttttaagcctacgtatgacagtgcaacaaaaataatcagcgtaacgtatgtcgaaattctttgagaacgaggcgttaccgtgatgccccatgtaacagcgaaagaccataaaccgttcgagaagtggaaaattgttgataaaacaccgacaatgtaaaaaccaagcatagccggagagctcaaaatattcgccatcatgtcgaaattgacctcagcgcccatttgtgcggcaatgcgggtttcccacacgtgccagctgacgaaaatgagggtgatgataccggttacacgctgcaggacgaatagccagtttctcatgtagctgtattgacctgcgttatttttcgcagtaaacgctatgtacacaccataaactgcatgataaattaatggtaagaagataataaaaatttccaaggcatacctgaaaggcagactatccataaaatgagcagcgctattgaatgcttcagcgccccttgcggcaaactggttgacgactaaatgctgaataagaaagatgccgaccggtatgacgccaagcaaggaatgcaatcttcgaaaataaaactctctgttcccagacattactttaccccctgtttgataagtgcgaaatgtgctaaatctcttcccccacttctttcaattgtaagcactttattaagatttattgacaatttcattttactcctccctcaaaagggcgtcaagaaaacgcgtacataaattataattttccgaattggttagttgattgaaaaattttattttatcaatatatatttcttacttaatttttcataagaattacaggatcattctgtaatcctcccccctgtttgagctataatatacgcaggagagaggggagacagatatgaagtctaaatttgaagcatctattgacaacctaaaagaaattgaaatgaacgcctatgcctacgaactaatacgagagatcgttctcccagatatgcttggccaagattactcttccatgatgtattgggcaggaaaacatctcgcccgtaagtttcctcttgaatcatgggaggaatttccggccttctttgaagaagcgggctggggaaccctcaccaacgtaagcgctaaaaaacaggagcttgaatttgaacttgaagggccgatcatttccaaccggcttaaacatcagaaagaaccttgctttcagctggaggctggttttatcgctgaacaaattcaattgatgaatgatcagattgccgaatcatatgaacaagtgaaaaagagagcggataaagtggttctgactgtgaaatgggatatgaaagacccagtgtaatcaaaaaggcggtgactgcatagtcccgcctttttgattgtcattacacagctgaagggtgttttgaaagctcaaatgcatcgtgaagcgactcgactgctttcaccatgtcattttcgcttacgactgttgacactttgatttcagatgtgctgaccattttgattaaaatgtttttttgcgccagtacagcaaacatttcagccgctacaccgggatttgagaccatgccggatccaacaatggatactttagccaatttgctttctgtctcgattttctcaaattccagcgcgtctttatactcttcaagcaccgcaacggtttggtctgcatcttctgttttgacagagaaggaaattccagtcttgtcctcggcctgcgtttggataatgatatccacgtttatgtttcttttggcaagtgtcgtaaaaatagtagacaaagttgtcaagccgctagtcagcccgtaaatggttactcttgtgatttgatcttcaaatgcaatgcctctgacaattaaattctgttccatggatgattcctcctcaattaatgttcccgcttcggtttctgtacttgaacgcacttctaacggcacttggtaatttttcgcgaactcaactgctctcggatgaagaacgccggcgcctaaattggcaagctcaagcatttcatcgtatgagatgcccgcaagttttctcgctgatttcacatagcgcggatcggttgtaaacacacctggcacgtctgtgtatatgtcacatttatcagcttttaaagcggcagccaaagcaactgctgttgtatctgaaccgccccggcccaatgtcgtaatttcacaatcctctgtcattccttggaagcctgcaacaatgacaatttttcctttttcaagctggtctgctaaaaccgaagtgtcgatatctgtaattctggcgtttccgtgaatggcctccgtacggattcccgcctgccagccagtataagacacagcgtcatagcctttttcctgcaatgccattgaaaggagtgaaatcgtgacctgctcgcctgtcgccagcagcatatccatttcgcgtttgctcggctggtcagaaatagcttttgcaaggctgaccaattcgtcagtggattttcccattgctgaaacgacgacaacgacttgatggcctttctgtttttctgcaattgcgcggtttgccgcattttgaattttttcgactgagccgacggaagtgcctccgaatttttgtacaataagacccatgtattaccaccctttacattttggttcgtgcgggtgaggagaaagagcgctttgtccacaataaaaaaagcaatgagaggaatactctcattgcttatcaattaatcatcataaatgattatgaacaacgagatagccctccaagaaaatgatttcttgacagccttacatttattcaatgcacggccagcaaataataccgatggggttttatttgcttcggcgacgctcccctttcagcctttttcacagaatccatctttctccaaaggcatactcttgaagttcgcacctctatcttcaccatataacacgatctaactatgaaattagttcacattttatcagatcttatttaaaaggacaacattatttttgcaatttgtcgtaaaggagctgagccgccgctgcgggaacaccggcttttttgatgtcctcaaggcttgcttccttcatttttttaacggaaccgaaatgctttaacagcattttctttcttttctctccgatacccgggatgtcgtccaaaacggattgaaacgcgctttttccgcggatttgcctgtgaaaactgattgcaaaacggtgcacctcgtcctgaatgcgctgcaggaggtaaaattcctggctgtttcgttccagatacaccacctccagcggatcaccgatcagtaaatttgaggttctgtgtttttcatctttcgctaaaccggcgatcgggatatccaagccgagttcattttcaatgacatcccttgctgcgttgatctgcccttttcctccgtcaatgataatcagatcgggcagcggcagattctcacgaagcactctcgtatagcgtcttctgacaacctctctcatagaaccgtaatcatccggccctgtaacagttttgattttatatttgcggtattcctttttgtatggtttgccatcgataaacacaatcatcgcggaaaccgggtttgtcccctgtatatttgagttatcaaacgcttcaattctgtgcggcgtataaatatttaatgcctcacctagtttctgcactgccccgattgaacgctcctcgtcccgttcgattaaagagaatttttctttcaatgcgattttcgcatttttatgggcaagcatgagcagttcttttttcgggccttttttcggctggtgaacgtttgtttccagcagctgctcgatcatagattgatctacgctgtccggaactaaaatctccttcggaaggaagtggttgttttttgaatagaactgcccgatgaacgtgaggaactcttcatctgcttcctgataaagcgggaacatgctgacatcgcgttcaatgagctttccttggcggatgaaaaagacctgcacgcacatccagcccttatcgtacgcgtacgcgaacacatcacggtcgactagatcgttcatcgtcattttttgtttttccatcgttgattcaatatgggccatttggtcacgaagctcttttgctcgttcaaactcaagattctcagcagcttcatgcattttctcttcaagctcttttttgacctcattatagccgccccttaagaaacgtgtaatgctttcaaccagctctctgttcgtctcttcggaaatatcctttacacacggagcgaggcattggcccagatgatagtaaaggcacactctgtccgggagcttggagcattttctgagaggatacagacggtcgagcagtttttttgtttcccttgctgcctgtacattcggatacggcccgaaatagcgccctttgtcttttttgacattgcgggtgacaatcagccttgggtggcgttcatgggtgagttttatgaaaggataggttttgtcgtctttgagcatgacgttgtatttcggatcatgctttttgatcagattcatttctaaaataagcgcttcaagattggaggacgtcacgatatattcaaaatcctcgatttccgtcacaagcctttgggttttcgcgtcgtgagaaccggtgaagtaggagcgcactctgtttttcagcacttttgctttccctacgtagatcacagtctgctgccggtccttcatgagataacaacccggttgatcaggaaggagggcgagtttttctttcagttgtttgttcatatgttacccttccttatgtttaatcctttatttccagtttaacacgaacgtttgtttttctctatggttcacaattggcgaataaaaaaagcgatccctcaatcggaatcgctctggcatgtaagcagcggaaaattaaagatgtttgtttacaagctcttgaagcgcttcttttggtttgaagccgactgaagtttcaactacttcgccgtcttttaacacaagaagagtcgggatgctcataacgccgtattttccggcagtttcttggttttcgtctacatcgatttttacgattttcagtttgtctcccatttcttgatccaattcttcaagaacaggtgcaatcattttacaaggtccgcaccaaggagcccagaagtctgccagtacgacgccttcgcttgtttcagctgagaaagattgatcagttgcttttacgatagccattattgaattcctccaatgtgaaatgatgatttttagtatagcatctcccattcgttcacgctattttaatgcttacaaattattttttcctgatcacagccggtttactcatttttatatggttgaatgggatatgctctttttttaaaacacaaatctgataatggccccaatcactacaattgccccaataatcattaaaatggtacgaagcataagatcacatctcctcttcactgtcatgtactttaccatgccctgccggagctgttttaaaacctgaaaaagagcgccggcatgaagctccggcgctcttgcgcgattaagaatcagcacgcagcgtaagcaagacgactgacattggcgggagttttactttcagtttgtttttgctgagcgtgtattgcctgaaggattccggtttgacatgatgaggatcgtcaaacgtgttatgcgcattcattttttctgccgtaagaatgactccggaatggtccgctgccttgtgtaggcccctcagctcgatttccgcctccgctttgttttggtgatcgatgttgcaaattgtgatattgatatcgccttcagtttgtttcgacgctgaaatgctgatttgcggaagcgtttcaccgttccattcatagtcggcagacattgtctctgtggctaaaagagaagcgtcctggtgcaccttaaacatattgaatacatggtacgtcggtgtcaaaagcatccgctctccctcagtcaaaatcatcgcttgaagaacatttactgtttgggcgatgttggccatttgcacccggcggcaatgctgatggaaaatgtggaaatgagaagccgccaccagtgcatcacgaatggtgttttgctgatataagaaaccgggattcgtgcctggctcgggatcaaaccacgtgccccattcatcaataatcagcccgacccgctgctccggatcgtaccggtccataatcgtgccgtgtttttgaatcaattcatcgatgtatttggcttttttcatcgtaataaaccattcatcttccgtgaattctgtggctgatcctttgcccttccagaaatcccccggaatcgtgtaataatgaagactcaacccgtccatcaggccagcggcttttttcataagcacgtccgtccaattaaaatcatccacatttgcgccgcctgcaattttataaatgtcattcccgctgtaattgcggacataagtctgaaaacgccggtacagatctgcgtagtattcgggatgcatgttgccgccgcagccccagttttcattgcccacgccgaaatatttcagcttccaaggctcttctcttccattttgctttctccagtctgacatcggcgtgccttcttcaaatgtcatatactcaatccactccgccatttcctgaacggttccgcttccgacattgccgcaaatatatggctcgcattcaagcagctcgcaaagcatcataaattcatgcgttccgaattcatttgattcaattgtaccgccccagtgagtgttcagcattgtcttacggtcaccgacaccgtttgcccaatggtattcgtccgcaaaacacccgcctggccacctgaggacagggatgtgcagctgtttgagcgcctccagcacgtcctttcgtatcccgttgatattggggatgtctgagtccgttccgacccagatcccctcataaatccctcttcctaaatgctcagcaaaatgaccgtatatatttttgttaattgttccttttacgatatctgtttgaatcactgcttgatgttcagacatgcctctgatcattcctttcatacggatatgaaaagcaccacagtcaaatatgtgatctgtcttttgcctgaggagtcagcatgaatgtaagcgcttttaaagtaaccatattatatatgttcgtacatgtcaacgacattttctattgtttttatatttgtacgtatgtatttataaatatgaaaaaatcccgaacttttaaagtccgggatttcctttatgagtgtatattcaattgtttgaattcctcagttaataacgggacaacttcaaataaatcaccgacgatgccgtaatccgctattttaaagatatcggcttcggggtctttattgatggcgacgatcaccttgctgtttgacatgccggccaaatgctggatggcgccggaaatgccgcatgcaatgtacaaatccggagtgacgactttcccggtctgcccgatttggagagcgtaatcgcaataatcagcgtcacatgccccgcgagaagccccgactgcggcccctagcacctctgcaagctcctgcagaggctgaaatccctccttgcttttgactcctcggccgcccgcaacgataatttttgcttcggagagatcaacgccgtcagctgtttttttcacgacctcttggataacagtgcggaggtcagtaagagaaacatcaatgcttttgatgctccccgatctgctggtgtctttttctgaagcttgaatgttattggggcgaattgttgcaaagatcatcggatcggttgaaatgacgcgttcaaaagctttccccgagtaaatcggccgtgtgaacacaacattccctccggtaacgcttacatctatagcatcagaaattaagcctgtttgcagccgggcagcaagcttcggtgaaagatccttgcccattgccgtatgcccgaagatgactgaatcaggattttcttgctcgataacacctctcatgacctggctgtacccgtctgccgtgtatgttttcagcttcgggtcctcagcggtaagaactttatctgctccgtaatgaataagctcttgtgcaatgctttgtacattttcaccgatgagaacaccgatgacttccccatctcctgaaatggttcttcctgcagctattgcttcaaaggtgacattccgcaattccccatcgcgtatttctccaagcacgatcactttttttcccattctaacatccccctgtttctttgaatgtccaagctttaaatgactttagcttcgctgcggagcaatgaaacaagctcttttgcctgttcagcaggctcaccttggagaagcttcccggcttcttttttcggcggcagaaaacgttcaatggttttcagctttggttcagcatcctcttcgtccaggtcaagatcatcaagttcaagctcttcaagcggctttttcttagccttcataattcccggaagcgatggatagcgcggctcgtttaagccctgctgagctgtgacaagcaatgggagcgtcgttttgattttttcaacatccccttcgacgtccctttctgcttctgcatcagtgccgttgatttcgagtttggtgatcgtagtgatacacggaatgtccagcagctcggcaagccgaggcgccacttgtcctgatcctccgtcaatggcaacatttccgccgagaatcaaatcaaactcctgatccttcatatagtggtataaaacttgagaaatggaatattggtcgggttcatcaagatcatcttctatgttgattaaaacagcttggtcacaacccatggcaagcgccgtacgcaattctttctccgcttcttcaccgccgaccgtgacagcggtgatcgtgccgccatgcttttccttcagctggatggcttcttctatcgcgtactcatcatatggattaatgatccattccgctccgtcatcctgaatctttcctgtttcaatgacgattttttcttctgtgtcaaacgtccgtttcatcagtacaaatagattcatgatcatatccccttttattcgcctttgaactgaggctttcttttttcgagaaatgcctggatgccttccttggcgtcctctgactcaaatgcttccccaaatcgctttgcttcaagctttaagctgccttcataggaatacaccttgttggaataaagaagttcaagcaaagatgccagcgtttgcgggcttttctctgcaaacttagcggcaagtgcttttgctttttcaatcacttctgcctcatctttcgctccaattgaaacaagtccgagatcaagcgcttcttttccggatatcggttctcctgatccgatgagctccagtgctttggctgtaccgacatatctcggaaggcgctgtgtccccgcaaaacctggaatgataccgagattaagctccgggagccccagcttagcatcttctgccgcgattctgatgtgacaggccattgcaagctccagcccgcctccgagagcagcgccgtgaatcgctgcgataatcggttttggaaaactttcgattctctccattaactgctggccgcgctcagcgagcaatgaggaatcctcattgcctttaagcgatgtaaattctttaatatcagcgccggctgagaaaaatcttccctcgccgtgaatgataatgcttcgtacgcctgcatctgtctcacattgatcaagacaggaagacagctcttctaatatccggcttgaaagcgcgtttgccggcggattgtgaatcgtcaagactgccacaaattgatcaaccgcaagtgaaattgcattcataggacagaactcctttacttattgtgaattccggataccaataattctaaaacgctgtttgaaagcgcaacgagatcgtacttttggtcattcatcacccaagttgtcacagtttcgtcaatcgttccaaaaatcatctgccgggcgaggcggacatcgaggccttcttttatttcgcctgattgtataccttccgtcaaaatgccatccaaaatatttaagtagccttttaatatttcgttgattttttggcgcagctccaagttggattggcggagctcaagctgcgtgacaatcgcgagattatggtcacccgctaaaagggaaaaatgctttgaaatcacaagcgccaatttctctttcgctgttgctttttctttaatgtcctcttccatccgctcaataaattgacccattttttctttgaaaagagaaattaaaatatcttctttgtttttaaaatagagatagatggtgccgtccgctactccggcttgtttggcaattttggatacctgtgactggtggtagccgttttctgcaatgacttctactgctgcatcaataatctgcatatactttggccgtttttgcttcaatgttcatcgttccttcctacagaaatgaatgactattcattcataatttcatgataagaaggattttcaggtttgtcaagtttattcataggcgttctctttttttatttgatatgatgattttcggtttcttcttcaagtaaacgccttcttaaaatttttcccaccgccgttttcggcagctcttttctgaactcataggctttgggcaccttatagggagctagtcgagatctcgcaaaggcatccagttcttctgcatcggcttttgcgcctttctttaatacgacaaatgcttttactgtttctcccctgtaggaatcgggaacgcctgcaacaacaatttcctggatggcttcatgttcataaagcgcttcttctacctcacgcgggtaaatattgtaaccgccggcaatgatgatatccttcttcctgtcagcaatatagaaaaagccttcttcatccatatagcccatgtccccggtgaacagccaaccatctctcagcactgcggcggtttcctctggtttattccagtatcctttcatgacttgcggaccttttacaatgatttctccatgctcatacggagcggcaagctcacccgtctcttcagaatagatcgcagcgtccgtactcggccaaggacagccgatactgcccggcttgttttttccccagataaagttggcgtgcgtcactggggatgcctcagacaaaccatagccttccacaagctttccgccagtcaccttttcaaatttctgctttacctccacggggagcgcggctgatccgctaagacagcttttaatggatgacagatcataatgctgcaattcggggtgatgcaaaaggccaatgtaaattgtcggtgcgccaggaaagagcgtcggtttgtgtttgtcgatgattttcagtgtttcgagcggatcaaacttaggaagaagaatcatttcgaagcctagtttaatcgaatagttcatgactgccgtcagtccgtagacatgaaaaaatggaacgatgcccagcactttttcagcgccttctttcacgtcatacatccaagcggcgcacatttcagtatttgccaaaatattttggtgcgtgagcatgaccccttttggagctccggttgttcctccggtatactggaggacagcgatatcatgctcaggatcgatcttcgggattgtcaggagttcagttttttcctgcttcatactggaagcgaacgtgtgaatgttagctgttttgtcaaagtcgatatgcactttttgtttttgcgtcagcgggtaaagaatattcttcggaaaaggcaaatagtcttttacgctggttatcaaaatctggtcaactattgatagcgttttcatttttattgccttcgggaaaagcaaatctaaggtgatgattacacttacctgagcatctctaagctggtattcaagctcatgctcggtataaagcggattcgtctgcaccacgatgccaccggcaaacaagacgccataataagaaatcactgtttgcgggcaattgggcagcataacagccactctgtctcctttttgcaggccattgcactgcaaaaaagctgcaagtttaagagcatccgtcagaatgtcatgaaaggtgagtttttttccataaaacgatattgcggttttatcagggaatcgtgcggcggagtctgtcaggatggattgcagggttttattcggcaacgggagctcatgcgggatatcgttgggatactcggcaagccacggcttttgagactgcataaaacctccccctttcgattttagagttccaccttatcattatagcagatggacggcaaaaaaaagaaaaagaaaggtaaatctttctttttctcataatatgaacagatatataagaccaattaacaaaaagattcccgccgcggcgagcagtacttttgcaagcttttccatttattctccgtccccttatattccggctgccaccacaaatgaaagcccgacagaaatgacaaatgaaataaagccgacagcccggttatcattttcgatttcctgatcaattttaaaccgcggagtcaaaaactcaaaaataaagtagctgatcagaagcataacaaacccgtaaacgccccagccgatcatttgcagcagcgaattatgctgggagatggaatgctgaaatacgtttgcgatccccaaaatttttccgccggtcgccattgccaccgcaagatttcctttttgaatctcttcccagtttttataagccgtcaccagctcaaacacagtcaaaaagaggacgaggcagagaaccgcgacactgtaatatgccgcgatttccacaagctcgttttcccaaaaatcactcatggccatactcccttttattttagttcaacaaccgtaacgcctgatcctccctcacctgcttcaccgaaacgggaacttttgacgctgcggtggtttttcagaagatcctgtacgccttttcttaaagcgccggttccttttccgtggatgattgacactcttggatatccggctaacaccgcatcatccaagtatttttcaacccggcttagggcattttcatagcgttcgccgcggagatcaagttcaagcgatacgtgatagtcctttcccttgaccgctgtaatgattttttctttttttggctccggagctgatttgataaactccagatctttttcttttactttcatctttaaaataccgatttggacattccattcattgccgcctgttttttcgagcaatgttcctttttgcccgaaagtgaggactttcacctcgtcgccaggcttaaagtcgcgtttttgcgctttcggcttctccggtttcttggacttttcaaaagccggcatagcgccttctaaccgtttcttcgcgttaatcagctcgtgatccttgaaggatttgtgttcttcttttatggagcgcaattcatgaataatgtcctcggcttctttcattgccgcttttactttttcagcagcctgctgttctgcctcttcaagcattttgtcttttttgctgttaagctcgatgatttgctgctgcagctctttatgcagtttttccgcttcttttctgattgattctgtctcagaaagctcttcttccgcacgttttttgctttgttccagcgacgcaatcatcgtatcgacttcgttatgctcggccgtcatttctgacttcgcctgcccgatgatatggtccggaagcccgaggcgttttgaaatttcgaaagcattgcttcgacccggcacaccaattaaaagtttataggtcggtgacagcgtttcgatgtcaaattcaacgctggcattcatgacgccttctctgttatagccgtacgccttcaattccggataatgcgtcgtagctaacactcgtgcattggtgcgatgcacgtcatccaagatgctcatggcgagggccgccccctcctgcggatctgtccctgcaccaagttcatcgaaaagcacaaggctgttttcattgacctgttctaaaatgccgacaatattcaccatatgggatgagaacgtacttaaactttgctcaatcgactgttcatcaccgatatcagcgaatacgtgctcaaatactgccgcttctgacccttcatctgccgggatatgaagacctgactgcgccattaaggttagcaggcctaacgttttaagggtgactgttttccccccggtgtttggccctgtgatgacaatggttgaaaaatcgcggccaagctcgatgtcattggcaacaacttgatcaggcggaagcaatggatggcgggcttttttcaaacggataaagccggtgtcgttcataatcggttttgtcgctttaaccgcttttgcatatctagcttttgcaaaaataaagtcaagcgtctgcagcacttgcaaatctagaaatagttcctctgtatactctgccgttttctctgtcagcacacgcaaaatccgttcaatttcttgcttttctttcactttcgcctgctgaagggaattgttcatatctacaatcgcctgcggttcaatgaatagtgtcgcaccagaggatgaggtgtcgtgcacaattcctccatagctggatctgtactcctgtttgaccgggatcacaaagcggtcattccgaatcgtaacaatcgtatcagacagcattttcgatgcggaagaggaacgcagcatcgactctaaccggtctctgactcttgattcgagtgttctgagctgtgtgcggattcctcttaatgtttccgatgcatgatcaagcacttctccgtgatcatcaatgcaggaattaatgtcccgctctaaatcggacagcgtgataagctgttcagcatgctgatggatcagcggaatgtcgacaccgtcttcagccatttgggtgataaaatgtttcatttgtttaactgcataaagcaggcctgagatttcagtgaattcagaaggactgagaacactgccgatttccgcccgtcttaacgctcctctgatatctacaaggccgccaaatggcgcttggcctctcagccggataatgtcagaagcttcgtctacttcatccagctgttttttgatttcgtctatagaagcagaaggcttaagctcgagaagcatttcttttccgagcgatgaagcggcatgcccaataacctgttctttcactttatgaaattcaagagctgataatactttttgctgcacgattgtgtgagcctccttacttaatcgttgcgcttcagaaatgcctctacgtctttaagcgaccgggcattcagaacgtttttcgtttccgtccatcctttgcgcgcggcagtaacgccagttttcatatcgtctaacatctcaatattatgggcatcagtattaatcaccaatgtaaccccttgttcgtttgctttcattaaatgctctgtgcgcagatcaaggcgcgcagggttggcgttgagttcaagcgccgtatttgttttcctcgcaagctcaatcagctgatcaatatcgatttcgtaaccggcccgtctgccgataaggcgcccggtcggatgtgcgataatgtcaacatgcttgtttgtcagtgccgtctcaagccgtttcataatcacgtgttccggctgattaaaactggaatgaatcgatgcaataacgatatccatttccgcaagcacatcgtcatcataatcgagcgtaccgtcaggcaggatatccatctcaacgcctttcaaaatacggaagttttcaaactctgcattcagcgcgtcaatttcttttgcctgctgcttaagtctttctgcagtaagcccgttggcgacctttaaatattgtgagtgatcggtgatcgccatgtattgatagccttttttgatgcaggcttcagccatctctctgatcgaaaatgcgccatcgctccacgttgagtgcatgtggagatcacctttgatttgcccgagctctatcagttcaatgctgtcgctgtaggtttccacttcctgtccgctttcacgaatttccggcggaatcagcggcaggccgaagtgcgcataaaattcacgttcactcggaaatgttttgatctctccggtttcaactgtctcaacgccgtattcactgatccgctcgccgcgttctttggcgatttggcgcatcttaatattgtgatcctttgatcccgtaaaatgatggagtgttgtcggaaactgctcttccgtcacaagacggaaatcgacgcttgtttcatattcaaaggaaaggatgacggacaccttcgtatctccgcttgcgattacgcttttgatgtttggcagctcaagaagctgctctcttacttcagccggatgatctgtagcaatgatataatccagatccttcaccgtttcccgcgctctgcggagacttccggcacgagaaaatttgatgatatgcgtaaattgagaaagatgctcctcaatttcccgcgcgatccggagggcgtatccgatcgggaaccgttcaggctgttttccggcttccccgagcgcctgtaatattttttcttccgattttttgccgaagcccgcaagaccctggaccttttgctgctcacaggcttccttcagagattctgcatcgtgtacgccgagctctttatacagctttgcgatttttttgccgccgagccccggcagcttcaataaaggcacgagtccttccggcacttctttctgaagcgattcgagcgtgcttgactttccttcatctatatactctttaatgacgctgtacgttccttttccaatgccggacagcgacatcatatcgtccatttctgataagcttcggtcgtcctgttccaaggctgccgccgcttttcggaaggcagatactttaaacgggttgtcccccttgagttccatatagactgcaatggtttcaagcagccggataatatcttttttatgcatatcataaccccagacgttcacatatgtttccatcatacttgaaaaaaacttctccggacaagagaagtttttttatgccccgtactgtgtccacagctcttgtaaaagccctgacaagtacggtgtatggttaatgatcacatttgcgagagacgattgtcccatcatttgctgcaacgcatctaccggcagaacggatgcgacatacagcagcacaaatgtaaataaatagacttctagaaaaccgagaacggctcccagcatctggttgatttgtttaatcaccggaatgccggctacaatactcaggaacgagccgatgattctcagtaagattttagcaatgataaataaaacgataaacgcaatcgcattatagtacgctgcttccaaattccccgtaaaaaaagaaagagccggctgtcccgctgaaaaatcgggtgcgggaatccaatgtaaatgcggtgccacgtttttatagaataaagccgcaaaggcaattgataaaataaagctcgtcaagcggataaactgcaggataaaaccgcgttttaaccccagtaaagtccccatcaggagcaagattaagatgatgatatcaagcatagttgttcaatccttttctttaagctgacgctccagtttttcacatttctcttgtaatttgacataatcgtgcaccacatttaccgctgtcagcactgcaagtttatttatatcaaggtatggatttttttcattgatttctctcattttatcatcaacaattccggcgacatacctcatatgggctctgctttcttcaccgacaatcgtgaagtgctggccgtaaatgtcaacggttgtttttgtttttttgccgtcagacaacgtttctcctccattccgcgagaatcctagttcttatcataacacgtttattaaatgaatggaaagacgagcctcccgctgttatgatacactggtatatacagcgaaaagtgtaaaaaaaggagattattacgtgtcccattcagtgataaaagtatcgttgtctgctattgaccaaatgaaaatgacgtacagcggttcacttacagcctctgttccgcagggagccgtttttcaggcaaaaccgcccggctgtaccattacagcatataaatcaggcaaggtcttgtttcaaggaaaaaacgctgcggcagaatccgcgcgctggggaacagcagagcctcaggaaaagaagaaaacggccaaaaagccggctgatccccgctatgcccctccggcagatatcgccggaatgtctgttatcggttctgacgaagtcggaaccggagattactttggcccaatgacggttgtatgcgcgtacgtcgacaaaaccatgcttcctttaatgaaggaactcggtgttaaggattctaaagatttaaaagatccgcaaatcatcgagattgcccgaaacctgatcaaaactattccatatagcctgctggttttaaaaaatgaaaagtataacagcatgcaggaaaaaggcatgagccaagggaaaatgaaagctttgctgcacaatcaggcgatcacacatttattaagaaaattggatggagtaaagcctgaagccattttgattgaccaattcgctgagccaggcgtctacttcaatcatttaaagggcagagacattgtgaaggagcggacctattttagcacaaaagctgaaggtattcacctggctgtcgctgctgcttcaatcattgcaagatattcatttttaatggaaatggataaactatcacgcgcggcaggaatgacgcttccaaaaggggccggtccgcacgtcgatgaagcggccgccaagctgatcctcaaaaaaggggcatctgcactcagaacctttacaaaactccatttcgccaatacgcaaaaagcgcagcgccttgctgataaaaaacgttcatagaaaaaagcttgcagatttctctgcaagcttttttctcagcctcttaaaacagcttgatatgtgtcttctaacgctttcagcactttgctgtgcgcctttgtcacttcttcttcagtcagtgtttgttcagggttgacatactggagtgagaaagcgactgacttcttgccttcctccatatgttcgccttcgtatacgtcaaagacggttacctctttcagaagcttgccgccagcctctttaatgacgctctcgagctgtccgcttgtaacggttttatctgttacaagggcgatatcacgtgtcacagacggatatttcggaatcgccgtgtaaacaagcggtgctgtttctgctgcgagcaacgcatgaagatcgagctcaaatacgtatgtttcctttatatccagttctttttccaatgaagggtggacttggccgatgaagccgatcagagaaccattcaataaaatgttcgctgttctgcccggatgcagctgtttgcgttcagactgtacaaattcaatgctgtctaggacgttgagtttgtctaacagcccttccacaattcctttgacaacaaagaaatcaactggtttcttttcaccctgccatagctgcttgcgccataatccggtaacagctcctgctacgcgttctgtttcaacaggttttgtgtcctcttccttcgttaggaaaacggagccaacttcgtacagtgcaactgagtcagtctgcctcgcaaggttgtaagaaacagaatcaagcagattcggaacaagactgtgtctgagaatgcttctttcttcactcattggaagcgcaagcacagtattcagtgatttttcaatcgcaaacgctgccgctttcttctcgtttgtcagtgagtaagtgatggcctgtgataagcctgcgccttcaaggaagcgtctgactttacggcgttttgcctgatatggcgttaatccgcctgtagttcccgctgtctcaggaagcgtagacggaatgttatcgtagccgtacagtcttgccgcttcttcaattaaatcctcttctattgtaatgtcgccgcggcgtgatgggacagtcacaacgagaagttcatccgcttcaccgaccgtaaaaccgagacgtttataaatgctgatcagttcttctttactgatcgtcaggcctagaacgctgctcactttgtcagcagatacgtgaatgttatttgcttcgattgtcaggtgatcttcctcaactgttccagcaagcacctcaccgccggcatacagatggatcatctgcgcagcccgttctgctgcaagacgtacgcgcgccggatcaattcctttttcaaatcttacgcttgattcacttctcaaaccaaggtctttggaagccttgcgaaccgtctgcccattgaaatacgcagcctcaagcaaaatcgttttcgtatcttcctgaacctctgactctgctcctcccatgacacccgcaacggcctgcgctttcgttccgtttgtaatgacaaggtgatcggcggacagcttacgttcttgatcatcaagagttacgatcatttcattctcagctgcttttcttactacgacttccttagagccaaatctgtcataatcaaacgcatgaagcggctgtccgtattccaacaggacaaaatttgtgatgtcaacgacgttgttgtgcggacgaatgcctgcattcatcagctttgtctgcatccaaagcggtgacggagcaatcgtgacatttttaatgatttttgcagtgtacagcgggttcgcttcttgatcttcaattttgactgaaatgtaatcagacgcttgttctgaagcagccgggtaatccgtttgcggaagctttacctcagtgtctaaaatcgcggcaacctcgtaagcaacaccaagcatgttcatggcatccgcgcggtttggcgttaaacccagctcaagaatcgcatcgtcaagctgtaaagccgctaaggcatcgcttcctgtttcagcgtcattagggaatacgaaaatgccttctgcatactccttcgccacaagtttgctttcgataccaagctcctgtaaggaacagatcatgccatttgattcttcaccgcgaagcttggcttttttgattttgaaattgcccggcagcaccgctccgactgttgcaactgcgactttttgtcccttatccacattcggcgcgccgcaaatgatttgtacaggggcttcagctccgatatccacaaggcacttattcagcttatcagcattcgggtgctgctcgcgctccagcacatggccgatgacaacacctttgatgccttctcctttgtattcaattccttcaacctcaataccggctcttgtaattttttcagcaagaacagccgggtccatgccttttaaatcaacataatcctctaaccatttataagaaacaaacatccttgcatcctcctcttacgcctgtttaaactgcgaaataaatctgacatcgtttgtatagaagtggcggatatcatcaatgccgtatttcagcatcgcgatgcgctcaacacccattccgaatgcgaagccctgatattccttcggatcaaagccagccattttaagcacgttcgggtgaaccattccggcaccgaggatttcaatccagcctgttcctttacatactgagcagccgttcccaccacatttaaagcatgtcacatccacttctactgaaggctcagtaaacgggaagaagcttgggcggagtctgatttcgcggtcttgtccgaacatttttttcgcaacaagttcaagcgttccttttaaatcactcatgctgatgtttttgtcaacgacaagcccttcaatttgcataaattggtgagagtgcgtcgcatcatcgttatcacggcgatatactttacccgggcaaatgattttaacgggacctttgccttcatgcttttccatcgtccgtgtttggacaggggaagtttgcgttctcatcaaagtctcctctgtgatgtaaaagctgtcctgcatatcgcgcgcagggtgttctttcggaagattgagcgattcgaagttgtaataatccgtttcaacctctggcccttcctcgactgtgtagcccataccgataaataaatcttcaatttcttcaatgacaacagtgagcggatggcggccgccgactgcaacagggttccccggcagcgtgacgtcaattgtctgtcctgcaagcttctgtttcatttcctcttcttcaagcttctcgtttttgtcagcaatcgcattggcaatacgctcccttacttcgttcgcgagcgcccccatttttggacgttcctcagcagaaagcttgcccattccgcgcagcacttctgtaatcggccctttttttccgagatattgcacccgaatatcattgacaatcttcaatgagcttgccgcttctacttgttctaaagcttcttgttccagctgttttagcttttcttccattttgcatcctccttttatgtaaacaaaccgtcatatgtctttggaaaataaaaaaaacccgtcccttttacaagggacgagttgtggccgcggtaccacccttatttcagacagactgatgctgtcgtcagcttcattgacataacggaatcagattccggttcacctttacgcgcagtgtacgcggtcccggcgacaactcaagaggtgaagccaatttccggctgcgttaaaaatgctctcagtcagcggcattttctccctggaaagcagttgatcagaaattgaggtcctctgtcacggtttttgaaatattatgttctattatagagaaatccaacgcttggcgcaacactatcctcgcaagtgatacacgaggatggcagccgcaaccgcaacgtttagtgattcagcctgtccgtaaagcggcacgtacaggttcaaatccgttttttccagcaatgcagcatccacccctgcaccttcatttcctacaatgagcgcaaaggattcagactgaggaatctcctggtaaggcgctccgttttgcagcgccgtgccgtatacttttacgccctctgccttcaattcgtccacatatgaaggcaggtttcttctcacaacaggaatatggaagtgagatccttgagcagatcgcagtgtttttccgttaaaggcgtccgccgtgccgtcaccgagtacaaccgcatccaaaccggccgcatcagccgttcgaatcattgtgccaaggtttcccggatcttgaacagcgtcaatcagcagcaccttgcgtgccgttgccagcttttcttcaggcatatggcacacagcggcaatctgctgcggcgtttcggtttcagtcacagctgaaaacgcatcttcactcagcatatagcactggataccagtctcaagatctgaaggaatcttcgtttcatcctttacaaggatttctttcacaatgcccgggcttttcaacgcctcttcaacgaggtgttctccctctatcagaaatgtatttgtttttgttcgttctttttttgtgtgaagctttttccaatccttcactttttggttttttgccgattctatttgtttcactgtctatgtggcgctcctttttttaacatgatgttattatatcgcaagaacagcacataataaaccaggtgcagggttagaatatacgtattacattttagaaaaaggagcgttttacatggatcttaatttacgtcatgccgtcatctccaatgtcaccggcaataatcaggagcagcttgagcatacaatcgtagatgcgattcaaagcggtgaagaaaaaatgcttccagggctcggcgttttattcgaagtcatttggcagcacgcatccgaaagtgagaaaaacgaaatgctgaaaacgcttgaaggcggattaaaacccgccgaataagacatgaaaccgggtgacagcgcccggtttttttcttatataataaaaacatgatgagggggaacgccatgtttttacagccgttattagcgaaaaaaattattgctgaagtaaaaaaaatgtacgaacgtgaagtcattattgtaaacacggacggtcttattatggcaggcacaaacgatgaacgtgtcggacaatttcatgagggagcgcttatctgcgcaaaagaaagacgcagcgtgattattacaaaagaagatgaaacaagattaaaaggagtgaaagcaggcataaacctccctgtattttttgaccatgatgtgatcgccgtcttcgggctgacaggtgagcctgcagagattcagccattcggagaactgcttcgaaaaatgacagagctgttcattaaggaatcacggcatttagagcaatcccagtggcgtgagagaatgctggagtcctttatgatcgattggctgcaactaaaggagtggtctcccagttttcttgagaaagctcagcttcttggtgttaacctttcctcccggcgccaaatgattcttattcaggggtatgagtggtcacgtcatgatattgaacaaatggcacgcagctggaaatcctcgtaccctgcggatttgttcatcaggtggggaaatgaacggatcttgattaatcatgaagtgccgcagcatgaacaaagggatcggcttttacggaagatccttcacatttgttcgtttgccaataccgcaaacagccaatttgcagcagctggcgccggaagggctgtcgcaagctccagcctgacagattcatacgagcaagcggaaaaagcgctggctgtcagccttaagcgaaaaacgcccatatttgaagaggatctgaagcttgatatgtgtctgacggagatcagcccgggaacccgaaacgaatttccgcaaagagtattaggagaggcgctagagcatcaggaacttatgaatacgttacggactttctttcatcacgatttgtctttgaaacaaaccgcagaagatatgcatattcatatcaatacattgcgttatcgtctggctaaggctgaacagctgacgggtttacgttttgaccgtaccgaggacgtcgtcacgatgtacgtcgcactctattttttagatcaagatacaaaatagagagagtttcagtttcattttttgtatgtttctccatggaaggctttgctttttttcttttacaatagattgaaagcattttttgacagggggatgggtgaaatgatcaccaaggatgtaaaggaacagctgattcaggtctccggaccagaaaactttgatgactcgaatgccggccgtctcgtctattcatatgatgcgacgcctcagtatcagtctatgcctgatgccgtgattgctccgaggaatactgatgaagtatcacgcattttaacaatttgcagcgaacatcgagtgccgatcgttccaagaggatcagggacaaacctgtgcggcggcacgtgcccgactgaaggcggacttgtgcttctctttaagcacatgaaccagattcttgaaattgatgaagaaaatttaactgccacagttcagccgggcgtcattacgctggatatgatccgcgcggttgaaagcaaaggtttgttttatccgcctgacccgagttctatgaaaatatcaaccatgggcggaaacatcaatgaaaattccggcgggctccgcggattaaaatacggcgtcacccgcgactatgttattggactggaggttgtgctcgcaaatggtgacatcatccgcaccgggggaaaactcgcaaaggatgtggccggatacgatctcacacgtctttttgtcggctcagaaggaacactcggcattgtgaccgaagccatcgtcaaacttgttccaaagccggaaacaaagaagacgttgcttgctctttatgaaaacatcgatgccgctgctcaaacggtatcggacattattgccgcaaaaattatacccgccacgcttgaatttctcgaccagcctacacttttggtgattgaggattatgccaaaatcggacttccgacaagcgcaaaagcagttctgttaattgaacaagacgggccatttgaaactgttgaacgggatatggaaaagattgaggcgatctgcaaaaaaggcgacgccgtttccgttcagaccgcacaaacagaggaggaagcgtttgccctgactgaagcccggcgttctgcactttctgccctagcccgcctcaaaccgacgacgattttagaggatgcgaccgttcctcgctcagaaatcgccaatatggttaaagcgattaatgatattgctgctaaatatgatatttccatctgcacctttggtcatgcgggagacgggaaccttcacccgacatgcacgacagacataagaaataaggatgaaatggaacgtgtcgaacaggcttttgccgagatttttgagaaagcgattgaacttggcgggacgataaccggagagcacggagtcggggaaatgaaagcgccttacttggaaatgaagctgaaaaaagaaggcattgatgcgatgaaagcgttgaaagcggcatttgacccccggaacatattaaatcccggcaaaatgtttgcgaaagatgccagaaaacgtgtggtggcggaaagatgacaacagaaaaagaaatgaaacagatccaaaatgaatttaaagagcgtatggatgaaggagagttattaaattgtatgcgctgcggcttctgtcttccttcctgtccgacctatatcgaatcgggatttcaggaaacacactctccgcgtgggcgcatcgccttaatgaaagccgtagccgacggtatgattgaaccggatgaagatgtcgaacggtcgctgtcactttgcctcggctgccgcgcctgtgagcctgtatgcccgtctggcgtgaaatacgggcagctgcttgaggaagccagagatattatccaccaaaataaaaaacactctcttggtgaacgtgtcatgcgaaagacggcttttcacgagctgtttccgcatcaaaaccgcatgcgctcagctgtaagccttatcggtttgtatcagcgttcaggactgcaaaccgctgtgcgaaaatcaggcatgcttcggatcctgcctgagcatttgcggacgatggaagctgttcttcctgatgttccaaaaagcaaagacatgaaacatcggccgcgtttcctgccgtccattggccccatgaaaaaacgggtcgcctttttttcgggctgcttaatggatacgatgtttttaccgactaacaatgccacattgaagcttttacagctggcaggctgcgacattgtcatcccgcctgaacaggcttgctgcggggcgcttcatggacacagcggtgaaaaaaacacagggaaagagctcgcgaaacaaaatatcgctgctttcgaagcattagacgtggatgcagtcattacaaacgcaggaggatgcggagcctttctgaccgaatatgatcatttgctgaaggatgacccggaatggtcggagcgggccgccgcttttgttcaaaagctaaaggatttttcttccgttttggttgaacttgatttccatcaaatggacttagcgctcgagacgcctcaggtcgttacctaccaagattcatgccaccttagaaatgtaatgcatacgtcgcttgagccccgccagcttcttaaaagcatcaaaggggctgaattcaaagaaatggagaaagcagacagctgctgcgggtcagcgggaatttacaacatcgtcgaagctgaaatgtctatgagaatactggacagcaaaatggctgccgttaaagcaaccgaagcgattctcattgtaacagcaaatcccggctgcctgctgcagatgaagctcggcattgaacgcgaaggactaagcggtaaagtcagagccgttcacctggctgatttgctattggaagcagccgggcacaaaacatcatgagaaagcccaaaacagatattgttttgggcttttgtgcgttattccatcggactgcaaatttcgatataatgtccatccggatcagcgatataggcgaccgtctgcccccatggtttcactttcggctccccgataatcgatacgccttgttctctcatccttttgatgaccgcttctacattttcagtaacaaacccgatttcaaatgtgtttgaagcagatgtatccggaatgtccagcgccgtgatgtctctggcgctttcccgcgtattaagcgccaatatcgtagaccctgtttcaaattcgacatacgtgccgtgttcagcacgaatcggcagtcctaaaatatcccggtaaaaatgaatagcccgctggctgtccgatacgtatagaataagatatttcattgatagattcattgccaacccccctcagcatttttcaatagtccttctagcccggtatagatgcttccatccttaagctcggatctttccacatctgcgcccattttttcacagccgccacgataatgatgaagcctaacaccagcatgatgatagataatacgccattcaatacactatatcctgctgcttcaggattgagatacacattgcgcaccatccaatagcccgcataattgacagtgacatataaataggcaagcgggataaggcaagtcagaatgtaccggcgtttatcagcgattttcagcacgatcgtcgctccgataatcagccccactgaagccatcagctgattagaaacgccgaacagcgcccaaatggaaccgatatctcctgaatacagcaagtacccccacatcaaacaggcaagcgcgctggcaaatacagagcccggaatccagtctgttttcttcagcggtttatacacctccccgaagaaatcctggatcaaataacgggcaacgcgtgtgccggcgtcaatcgctgttaaaataaagaccgcttcaaacataatgacaaattggaaaaagtatgaggccaaatggctgaaaaacggcattccggtaaaaatataagtcatccccaccgcaagcgtgacggctccccctgttcttccttctaagtccaaaccgatttccccgctcaattcaggcaaatgtacgacattcatgccaagcgtacggaaaacctcaggcgtgctgttaatcgcaaagtaatcagcaggctgtaaagcggtcgctgcaatcagcgccatgatgccgacaagacactcaacaagcattgcgccaaacgcaaccggcttcatatcactccatttattcagcattttcggtgtcgttcctgagccgacaaaggcatggaacccagagatcgccccgcaggcgatggttattgagatgaacggccagacaggtcctgccagcaccggcccgccgccttttacgaattctgtaaacgcaggaaacggaatagacggattgacgacaaacacaccaacaatcaaagcgataaaaacaccgattttcataaagctgcttaaataatcacgcggtgcaagaagcagccaaacgggaagcgcagccgcaaaaaacgcataaacaggaagcgcgattgcaagcgttttcgtatctagcgttaaaaagtcaccgagcgcggtagtctgtacccatggaccaataaagactcctgccattaaaaagagaaagccgaccgttgaagcgagctttaaatttcccgttttcttataaaataagcccacacccatcgcaatcggaatcgtaatccctaccgcaaatgttccccatggattacgttcaagcgcatgcaagacaaccatcgacaggcccgccattgtgatcgtgatgataaacagcatggacagtcctgtacaaaatcctgcaacagggccaagctcatccttcgccacttccgacagcgattttccgtttttgcgcatcgatgcaaacaacaccacaatatcatggacggctcccccaattaccgccccgattaacagccacaataatcccggcaaatagccaaactgcgccgccagaattggtccgaccagcggcccggccgctgcgatcgcggcaaagtggtggccgaacgaaacccatttatttgtaggcacatagtctttcccatcctcaagcgcatgagcaggtgttggcttgtcatcattcactttgagaaccttcaccatcataaatgttccgtataaacgataggcaatagccaaaatacacattgatgctatcacaattgtaaccgcattcattttctcccatcccctttgctgtttttcataaatatatcacaatttcatggtgaaaagcggtcattttttcctatacaaaaagccggcttgaacgggccggctcgtggcagttgaaagacaagccggagatttctctccggctttgctattcttatgactgttttttcaggcggatcacattccaggaaagcggcgtgaaatgagcagttaagccgttttcgctgacagacgatgatccgttggaatgcggaacgacattttttctgttatgctggtttgtcgctttgatatcctgatgctcaagtacgatgtgctctgcgatttggtaagattcaaagcctctgagcgaaatctccgtctccatctgatcctcagccttgtttaccgcaaaaatagtgagggtttcttcctcttcagagtacacaacagcagcatcaacatatggcacatcagtgaaatcagaacaatcgtacttaggagaagaaataagcggtttcagtgactcgccccttccgtaaacagaagcatgcatgtatggatagaaaatcggctgtctccatgcttctccgcctttttccgtcatgatcggcgcgatgacattgacaagctgtgcaagacacgcaattttcacacggtctgcgtgctgcagcatcgtaatgagcagagagccgactaataaggcatcttcaaaattgtaaatatcctctaaaatcggacgcgcagtgatccacggctcgacttttttatcagcctcatttgagtggtaccatacgttccattcatccagagagagattgatagttttcttgctgcgtgtttttgcttttacatagtcacaggtcgcagcgactgatttgataaaatgatccaaatccatggaacgggccaagtagtttggcagattgttatcccggtttccgtagtaggtgtgaagagagatatagtcgacatgctcatacgtatgctccagcaccttcgcttcccaatcgataaaggtcggcatgccgctgtttgagctgccgcaggcaacgagttcaattgatggatcaacccatttcatgacctttgccgtctctgcggctagccgtccgtattcatcagctgttttgtggccgatctgccacggtccatccatttcgtttcctaagcaccatgttttaatgccgtacggctgttcatagccatgcgatcttcttaaatcactccagtaagagcctttcgggtggttgcagtattcaacgagattacgggcggcatctatgcctcttgtgccgaggttgacggccatattgacctcagtgttcacctttttggcccaagataaaaattcatttgttcccacttcattggtttctgtcgtttgccatgccaagtcaagccttctcgggcggttttcgactggtccgacaccgtcctcccagttgtatccggataaaaagtttccgcccggatagcggatgatgggaacctgtaattctttgatcagcgactgaacatcttttctaaacccatcttcatccgcttcagggtgatcaggctcgtatatgccttcatataccgcacgacccatatgttcgataaacgagccataaatccgtttatctacttcaccgattttatattctttgtctacaatcattcgcgcttttttcatcacacgtttcctccttcattaacctttgactccccctaccgtcaggccggagataaagtacttttggaaaaacaagaaaatgataatcaccggcaaaatcgcaaatactgagccggatataagcatgtcgtaattatttccataagggctcagcaagctggacagccctattggaagcgtaaacatttctttcgaccgaagcacaatcagcggccacaagaagttgttccagctgtttaaggactgaaggataatcatcgcaccgaaagccggtttcatcagcggtgccataatcctgaaaaagatgccgaattccgtacagccgtccatccttgcagagtccagcagatctcttggaaggccaagagcatattgcctaaaaaagaaaacggcaacaggtgaaacgataaacggcaatatgacacctgtatatgaatcgatcaagtgcagtccgacggtaagcttaaacagaggaagcatcatcacttccagcggaaccatcatgataatcagcacaagaacaaagatgatatttctgcccttaaaatcataaaccgcaagcccgtacccgatcatcgaagaaaaaaacagggtgagcacggttgtgaaaagcccaagtacaagactgttaaaaaaccatttgaaataaatgcttccgccgttaaacagaaatgtataattatcaagactcattactttaggatcaatgtcgagattgagccccacacgcaaaagctcagatgacggctttaatgatcctaaaagcaaacagaaaatcggaaaaagatacaataggctcagcatcataaaaaacagggttagtgcgattctgtaaacgctgaactgaggactgtgccgcaacatttatccctcccccttaaacgagcctgacagctttaatgaaatcaggctgacaacaaggatcacaatcaaaagcacgatgccgatggctgctccgtaccccatttcgttgtaggcaagcccctgctgatacaaatatccgacaagcgtcagaccaatattacccggggaattattctgccaaaggacgtagctttcctcaaacatcctgaagccgccgatgatgctgatggtcagcacatatacggttacaggcttgagaaacggcagcgtgatgtgcagaaattttttcattgtattcgcgccgtctatatcagcggcttcgtacagctctttcggcacattttgcaaaccggctaaaaagtaaaggatgttgattcccatccatctccatgaagcaagcagcaccatcaaaaacatgccggtatgttcattgttcatccagttctgaggtgaaaagccgagtttgagtaggatggaattggccagagacgtttccatttctccgaagatcagccgaaaaatgatccccgcgacaatggttgaggtcaatgccgggataaataatgctgatttaaatatatttctaaatttgaccagctttgaattcaggaatatggccagaagcaatggaacaggaatcagcacgatcagcgtccaaaaggtgtattccagcgtattccaaagggcggtatagaacgtcgggttgtttagcgctgtataattagacaatccgacaaaggacacctctcccggcaaaattctttggaagctcatgatgaagacactaatgatggggtatagaaaaaatacgagaaaggataaaacgaatggcgctgtaaacagatagggcgccgctttttttgaataaaacagatctcgccagcctgattgtttcgcagctgaaggaacgggatgaaccgttcctgttttcacaggtttcatgagaacctccccgctttcactttttgaatgggattctatttctgtttcagttcacctgccgctctgtccaaggcttgtttaggcgttttttgctgagatttaagtgcgtcgaacaacacgcttctgttgacaaggtctgaagccttggcaaaatcctcatgtaaataaatcggattgatttcatccttgatatcgagcagcacagaaaaaatgcctgttccgttttggaagtaatccgtgtatttgtttttctctttcaattccttggagctccaaacatcccagcgaagcgggtcaaagccgagtacgctccagagttttttatttccttcttcagagcccttcgcaaaggccaaaaactcttttgctaactcaacatgcttggattgcttcggcacaacggttgccgtaccgcccaagcctgccgagcggtcgcccccctctttccatgccgggagcggcctgatggcaatcttccctttcagatcaggcatataatcgataaatcttcccatataccaaatcggcatgaggactgaagcagctcctccttggttcataaagccgtagtattcttcactgtgatgcccgccgcccggcgcaggaatcatcgttttatcattgatcatgtcttttaaatattgaagtgtttttacgttggtgtcattattgaggatcagcttgccgtttttatcaaaatagcctgagttttgctgtgaaatcatagataagaacgttgcggaatcatttgtttccaccgttcccatcggcttcccggtcactttgcgcactttctgtccggctttatggtaatcatcccatgttttaatatcgtcaggattgacgccggcttttttcatcacatccatgttataaaacatgaccgttgttcctacatgcgtatcgagtccgtaaagcttgccgtttttgctgtacagggtcagccgcgcctcaacgaatttatcgcggtccttttcaatcagcggagtcaagtcggcaagcggtatgtcagagcccttcaaaaagtttgaaaaacgggccaattcgacatcggcaatatcagggacgccttctcctgcaattaaggagatagacaagttatcgtgcatttgtccatacggataaacgaccgtattcagcttaattttgcggtcaggatatttttcattccattccttcaccatttctacatagaactgctcatgaagtccgttaaatgtccaaaaggtcagctcggtttcacccgacttcccggatgatctttctgctgaacacccagcaatgactaatgtcaatgtcagcaacatcatgagcacaagaaaacagacagtcatttttttcatctgcgttaccccttccattcgaggtgcgggctattcatatagaccatggttgatcagcgttttgttttcattgatgattcttaatccggtgcagcggtctcttaaggtgtgcgcgtgtctgaaggcattcttgacggaatcctgcccgacaccgatttcgtcaaaatacgcagggcctccggctgatctcagccaatcagccagcacttctccttccgggagagtttgataagccgattggatggcttgccgccggctcggtgaaaattcgttcagcccgtcatccttagcgagctttctgtatgtgtcagttaataaaacagctgcacagcccacctttgccccatgaagaatctgtggccgttttttctccattaattccatctcaatccaatgtgaaatatgatgctcgccgcctgatgccggtcgggaatgatctaatgccagcatgacaagccccgatacaagtaaagactccatcaaaacccgtatgccagtttccgttttcatcgcaatgtcttctgtgtgttcaatgcaggcagcaagcgcctcctgaacaatcttagctcctgctggcgaataaggctcgccggcaagatgccgggatatttcccaatctgctaaagacgttattttaccgagcatgtcaccaaagccagctgccaccattgactgcggtgccgcttttaatagatccagatcagcgaacagtgcagatggggccttcgtttgaatggttgttttcgtgccatataaaataatcggcgcaccggctgatgtaaaaccgtctacagatggagcagtcggataagaaataaacggcaaatctctttgaaacgccgcaaagcggacgatatcatgaatcgtgcccgaaccgactgcgatcatgacatccgttggttgtttcgtatggatcagcacatgaatgagcgatcgttcatcagctgtcacatctccggcttcattttctggaatgatcaggcactcggcctgaaatccttcttgattcagctgattttccagatcaattcctgcaatgcggtgtgtattcgcatcgcagacaaggacaatatgtttattgtttttttgttttacgtaattcaaaagcgaatcagctgcttgtttaccgagaacaatttcttcaacttttataggcaacgtcttttctccggcgtgttcaaaagcacgctgaacgtcagctgcgatacgattcatatcagaatcccctcctcagccaatttggttacatccttaatagaatccagcacataatccggcgtgtacaaacgctgttcgccctgtttcgcagaaccagttagcactaaggcgcttttcatgccataaagcttccccatcgcaatgtcagattcaatgctgtctcctataatcatgcattcatgtgcggacagccccattgctgtacaggcagcctccgccatcagccatgacggttttccgacaacaagttcagtcttcgcttgtgcggaagcctctatcgccccaatcattccagccacatcaatggcatttccgtcttcgttcggaaaagagcggtctttgtttgtagcgataatacgagcgccgccggcagccgcttgaaaggcttgatttaaatcgtcgtacgtgagcgtttcatgaagggagatcacgagccaatccgcttccttcggttcgttcgcgttctgcacaccggccagcctcagctcgtcaaccaagccttgttccccaagcacccatacctttgaaaaacgataatgttttttcagaaaagccgctgtcacgcttgatgacagaacaatgtcgtttacgtccgtttcaatccccgcgccaagaagtttttttctgcacatggcacgggagatattcccccggttgcttaaaaagacgattttctttcccattctcctaagcgttttgatcgcttctcttgctccttcgatcaactcatttcctctgaatacagtaccgtccaagtcaatcagaatgccagccggtgacacaggcgtatcatgactggccataatacgcatttgctccgtgttttcgataaaaatgcttttcatgcaggactgtattgattggggttacatccttgttcagcataatggagtgataggccatttcggcaaccgtttctaatacaactgcgttatgaatggcatttaaggcgtcagtgccccagcagaacggtccgtgattattcacgagcacacccggcacctgttcgtagttatgatgctgaaaggtttccgctatgacttttcctgtattcagttcgtagtcatgaatgatttcttcatcgtacatttcacgagtacatggaatcgcactgtcaaaataatcagcatgggtcgtgcctaacggagggatgtctctgcccgattgtgcccagcttgtcgcccattgagaatgggtatggacaattcccccgatattcggaaaggctttatataaataaacatgggtaggtgtatctgaagaaggcttaagcgagccttcgacgacctctccatcaaggttcaaaacaaccaagtcatcggctgtcaggtcgctgtattcgactccgctaggtttgatgacaattctttctttttcacggtcaatgccgctgacatttccccacgtaaaggttaccagctgatgctcttgaagcttcaggttggcagccagcacttctttttttaatgtttcaagcatgctccatcaccctttatcaattctttttggcggcagatgaaaattgaagatttttgatcgttttcagacgtttcatgacatggttttcttttccgaaataatgaaccagctctttatattcagcgtacaatttttcataaaccgcggcgttttcggcatttggcgtataagttatatctttcagttttcccatgttcgccgctgcctctttgatgtcatcgtagccgcctttttctttgcctgctgcaagcgcgccgaaaatggcagatcctaaggctggtgcttgcggtgaaccagagattttaatgtccatgtttgtcacatccgcataaatctgcatgacaaacgggtttttctcagctattccgccggctgcgtatagttcctcaatcggaacaccgctttctttgaatgtttcgataatcattcgggttccgtaagctgtcgcttcaactaacgctctataaatctcttcaggcttcgtcagcagtgtcatgccaagcagcatccctgttaaatctgcatcaacaagagttgaacggtttccattccaccaatctaaagcaagcaagccgctttcaccaggcgcttgatggtttgctttctcactcagcagctcatgaacgccaatgtttttttcctttgcttcctcttgataagctggcgggacacatgttttcacaaaccagtcaaaatgatcgccgacacaggactgcccggcttcatatcccgcatagcccgggagaattccgttgtccacaacgccgcacattcctggaacgatatgcacctcttcaccaagtagaacatggcacgtcgaggttcccataatcatcagcattttccctggctctgtaatgccgaccgccggtacggaaacatgagcgtccacattggcaaccgcaacagccgttcccgggagaagtccggtcagctttgccattttttcagtcagactgccggctttttctcctactgaatgaatagaacctgacaatttgtcttttgtaatcgttttcattgaaggatttaatttctcaaagaaatcatctgacggataccccgctttttcactccacatcgctttataccctgcggtacaattgcttcgcttgagcgagccgcacagctggtacacgatccagtccgcagcctcgatgatccggtcagccgcttcataaatgtgaggcgcttcctcggcaatttgcatgacctttggaatcatccattctgatgaaatttttcctccgtaccgctgtaaaaaagcctctccttcttcttccgcgatttgattgagccgatcagcatgtttttgggccgcatgatgcttccagagcttcacatagctgtgcggctcctcttcatattcaggcagcatgcataacggctgcccgctgctgtcaataggaaggatcgtacatgccgtgaaatcaattccaatcccgataatgtctttcggttcaacgcccgtctgttcgagtaaagacggaatggttgtttccaagacttcgaggtaatcagcagggtgctgcagcgcccagtcgcgcggcagcttttgacccgtttttggaaggacggtatcaatgacagcatgcctgtattcttttacagcagccgcaagttcctcccctgtttggacatgaacgagcaccgctcttcctgataaagttccaaaatcaacccctattgtgtaagccatgtgacatccccctctacttttgaagccggtaaagcgcctcgttccattttaactcgtgtttcagtttatgaattgtcgtatcacgggaaatgagaacactttcgatccccgccatttccgcccaatcaagcatttgctccgctgtcagttcataagacaggcaggtatgatgtgcaccgccggctaaaatccatgcctccgctgctgttttcaatgacggctccggcttccagagaacacgggcaaccggtaaattcggcatgtctttttcaatttcctggccggtgacttcattcagcacaaggcggaaacgcccgccaatatcaacaatgctagcttgaatggcagaacccctgatgccgttaaatacaaaacgcgcagggtcctctttgccgccaatcgaaagcggatgaacctcgattttcggctgatccaaagcgacagtcggacacacttcaagcatgtgagagcccagaatcatttcatttcccggttcaaaatggtacgtgtaatcttccatgaaggaagttctttttcctttagccatgattttcatcatccgtacaagggccgctgtcttccaatctccttcaccggcaaacccatagcctttctccatcaggcgctgaacggcaagtcccggcagctgtttcattccgtgcagcacttcaaacgatgtcgtaaacgctgtgtatccgccttgctcaagaaaagcggttaagccaagttcaattttcgcctgttctttaatggacgctacctttgcttcgtcacgttttgtttcctcactgatcacatatagtctgtcatactcggcataaagcgtgtcaacctcgtcgtccgtaatgcggtccatcacttcaacgagatccccgatgccatatccgtcaacctgccagccaaattgaatatgcgctcccaccttgtctccgtccgttaccgcgacatgacgcatgttatctccaaatctggcaaccttaatatgtctgctttcatttaatgcagccgccgtatccatccactgggacatttcttttttcacttcttcatcatcccaatagccggcaatgacttttcggctaagccccattctcgagttgatgtaaccgtactctcgatcgccatgcgcggattggttgctgttcataaaatccatgtcaatcgtaccccacgggatatcgcgattatattgggtatgcaaatgcataagcggtttttgataagaggaaaggccttctatccacatttttgcaggggaaaatgtgtgcatccatgtaatgatgccagcacatgtctcactgtactccgcttctcttaacagccctctaatggtttccggtgaagtgacgacgggcttatgagtgattttatatctggaagaaatcccgctgagcccctcacaaatgcttttagcatgctgatctacgagttccagcgtctcttccccgtataggtgctggcttcctgtcacaaaccagaattcataatcctttgtctgaagcatgtaaactgcccctttctcataaaataaaacgctttcaaatacaaaagatacgtactaatgatagaaaataaacctataaataaatatttgtacgaacaattttattatagtaattgactattatactgtcaatcttttctttttaaaaaagccgggggcagagcccggctttttgattcaataggacggccagcccgagctccaattcaaatcattgatgagaagctttggaatgccgttgtcattggcatcataggcatggcgaacaagaatgtttccgttcacaatatcctggcctccaggtcctttccattggtcattgcccgaatccaaaatggtgcctccgccttcaagcatgctttttccgcttttatcaagataagggcctgtaatgtttttggatcttccgtaagcaattttgtacgtactgtttaccccgtcacagcatttatcaaatgaaaccattaaatagtaatagccattttgatacgtaagagtaggagcttctaaggcacccccattattcggtctagctgcaatcgaatagagcgagcctgtaggcttcatcgtactcttatcgagcttagtcagcttaatgccgctccaaaacgagccgaatgcaagccacggattgccatccttgtcgaatgtcagctccgggtcaatggcgttataattatttgagcttgtcgaacgaatcaccaagccctcgtccttccagctccccgaactgatgcttgttgaagatgccaggccaatggcagatgtattgcttccaaaagaagaaacggaataatatagccagtacttgccgttatagtattggatgtccggcgcccactggttttgaccataattcggcacataattggaccaccacgatagcggtgtagtgaaaatggatttttgtacggtccaatttttagcgtctgaagacttcaaaacccgcagtccccgttcttcagtaagccctgttccaagcgcataccatgagctcccctctttaatcatagtcgggtcatgaagcagctcattggatgcaccccaaaacgctgcctctgcgggagcagcagaagtgaatatcaaacctgcagccagagctgcactcgaaaagtgtaagaagcgtttccatgtttttttctttttcaattttgtttaacctcctttatattagaaagcgcttacaaattagattgtttatcctcccttcctgtcaaatcgagctgcgtatcgtatatcgtcatgttcaggaaattttcggtatcccctttattgtagtcactatgctgtaatttgtacagacaaaaaaatagaatccgcctaaataggcggattcttccgtatctttattggtacgtaatttcgtcaaccgtttttcggtctaacttcttaatgacttccgtaattaactttaccgcgttttcataatcatcacgatgcagcatggccgcgtgcgtatgaatgtagcgggttgcaatggtaatggacagcgcaggaacgccattcgccgtcaaatggatggcaccagaatcagttccgccgccggcaatggcatcaaattggtacggaatgccggcttcctccgcagtggctacaactgcatcgcgcaaacctttgtgagagaccatggatgcatcgtaaacgataatctgcgggcctttgcccattttgctctgcgcttctttctcggaaatgccaggcgtgtctcctgctatccctacatcaacaccaaacgcaatatcaggctgaatggtgtgtgcagccgttttcgctcccctcaggccgacttcctcctgcacggttccgacgccatacactatatttggatgatctgtgttttgtaagtttcttaacacatcaattgcaatcgcacagccaatgcggttgtcccacgcctttgcgagtaggaatttttcattgttcatgaccgtaaattcaaaatgcggaacgatcatatctcccgggagtacaccccactccaaggcttcttcccggcttgaagctccaatatcaataaacatgtcttttatttccactgatttttttcttgcttcaggagataaaatatgcggcggcttagagccgataaccccagtgatttctcctttaattgtgacaacggtgacgcgctgggcaagcataacctgagcccaccagccgccaacggtttgaaaacggataaagcctttatctgtgatttgtgtcaccataaagccgacttcatccaaatgtccggcgatcataattttcgggccgttttctgcaccagtttttttggcaattaaactgcccaggcgatctgttgtcacctcatcagcaaatggttctatgtatgatttcatcacttgccttacttctctttcattgcccggtatgccttttgcatctgttaaatctttcagcatggtcaatgtttcatctaattttgccatgttccaaaccctccttcatcagtcctgcattcttattatacaaaacatggcgctaaccatacgactatttcacttgaaaatcgggtatatgtttttacagctttcttttagaaaaagtgaaacctttttctatgcttttcgtattacatcagatcatcaccataagggaggtgccttcacacaatgtttgtcatggttctaaggattattttgcttgcactttttgcttattgtatttatgccgtggtcaaatatgtcgcgaatcctaagagaaggcttaagctggcccaatcaaaagaacatttttatattattgatgaacaaaacaatacccggaagaattttcagctgacgtataaaggcgtgctttttgagggagaaaagcatattccttccaaggaccatccgctgtttattcacacgatctttgtctggacagaatctcctgagaagctgaaacatttctctgcaaaagattttgagaacattgaagaaaaagtgctggaacgatatccaaattgtaagattgactgggaccagcccattaaactcgcaaaaaaagcagaagagcgttaaacgcttttctgctttttataaatcaaacgggctgtagtaaatagcgatgagaatcgcttcaattaccagaagaagcggtactccatacttaaaagaagcgtgtttcgttttatgtctgaaggtttgcatgccaagccagacaccgagcgctccaaatacgatggctatcagccacagccggtcttcagaaattctccacttgtgctgttgcgctttgcgtttgtcaatgcccatcacccaaaaaccgcacagattaatcaacaccaaataagctgcaataatcatgttgcctcatcctttatatagaaaaagccgctctgctggagagcggctctatatgattacttgtttaattgagctttagcagcatcagcaagctgattgaatgcagtaagatcgtttacagcaagatcagcaagcattttacggtttacttcgataccagaaagcttaagaccgtgcattaaacggctgtaagaaaggccgttcatgcgagcagctgcgttgatacgagtgatccaaagtttacggaaatcacgttttttctgacgacggtcacggaaagcatagtttccagatttcatgacctgctggttagctactttgtataatgtatgttttgaaccgaaataaccttttgctaatttaagaacctttttacgacgcttacgtgtaacagttccgccttttactcttggcattgaatttccctcctaattgttccttatccgattacttgatgttagcaagcatttgtttgatacgtttgaagtctcctgcgcttacaacagcactcttgcgaagcttacgcttttgcttttgagatttgttggcgaataagtgacttgtgtacgcgtgagaacgttttaacttcccagaacctgtctttttaaaacgtttagcagatccgcggtgagttttcatttttggcatgggatttcctccttattgcttttcgtttttcggtgcgagcattaagaacatgctgcggccgtccatttttggttttgtttcgactgtcgcaacctcagcacatgcttcggagaaacggtctaatacacgctgaccgatttctttatgagtgattgcgcgtcctttaaagcggatagaagctttcactttatcgcctttttcaaggaatttaatcgcattgcgcaatttcgtgttaaagtcatgctcatcgattgtcggacttaaccgaacttcttttaagttaatgattttttgattcttgcgtgcttctttttcctttttctgctgctcaaatcggaacttaccgtagtccatgattcggcagacaggcggttttgcattcgctgcaactaacacaaggtcaagatttgcgcggccggcgatttcaagtgcttcctgacgggacttgattccaagctggtcgccattttgtccgattaaacggacctcacgtgcacggataccctcattaaccaattgatctttgctaataatgagccacctccatagtttcttcgaattgattcacaactcattttgtatgcattttgcaggcaaacaaaaagtgtgggcattataaaacacccacactacgaacatctgtatcaataaaaatgtacggtcaacctgccaactacatgcatgtgtcaatcaggtgagaagcgggtgcttctgcttgtgatttatattcaattcaataactattctacacaataccggatctttagtcaaggacgacttatccggaacaacttttacattgtaacatgggttttctatgagcgcaagagagaaaaagaaaatctttcatcccccccagaatgcaaagaaccaacaattccccccttatttcgcaatttacaacaaaaccaccgacaggaagaaatgtaaaacaaagttaatctctgaccgatataagaagcagaagggagcctgacacatgaacaaactgatacagcttgctttatttttcacattgatattaaccggatgctcaaatagcagcacatcttccgaatcaaaagtcgaaactgttaagacaactgcagcatttcctcaaaaggggctggagaaagagctaaaaaaactaaaacccgtttcattggacatgaagttcgagagtccacttgctactgagttaggaaagcggaaggcaaaagaagaagctgaaaagcaaagacaaatcgccgccgagaaaaagcttgaaaaagagcgggaggcgaaacgaaagaaacagcacgaggaaaaagcggagagacagcgattagcagagcagcaggcggcagagaatcagcgattagcggaagcaaaaagacaagctgaacttgaaagacagcggcaggcagcaatccaaaaagagcagaaagcgaacgctgagaaaaagcggcaatcgcaggcacaacggcagcagactgaggcacccccatctaatagtcaagatccaccatcttcctcgagtcagacagataaaaccattcaacagccagcttcagagcttcctgatgacgatggttatggttatgaagaacgaaaaaagtggcatgacgatcaagtagaatggggcattaaacaagggtatatcgatcccgaagacgcaccataaaataaaaaaagccaaggcattcagccttggcttatccaccgatcagctgcacgaacacagggatgaccagaaccgttaccactcctactacgacaacagcaatacttgccatcgcagcttcaacttctcccatctcaatcccgaccgctacaccaagtgcatgtccggatgttccaagagccaatcctttagaaatcggatttttcactttaaacaccttcaagaacaatgctccgagcgcatatacgatgacagcgttaaagatgaccgcaaaggctgtgatgtcgctgatgcccccgatgccttttgataaaggaagcgcaattgccgttgtagccgcctgcggaagcatgcttttcattacggccgaatcgagatgaatgcctttagcgagcaaataaacaatcgtgacagagcagatagagccggcaataatggaggccatgatttgccaccagtactttttaagcttatctctttgtttgtacaaaggaattgcaaatgcgatcgttgccggttcaaggaaaaacttaatgatctctcccccgttattataatccgcgtaggaaaaaccgccgatttttaaaaatgcgatccccagcaccatggcaacaaacaaaggagtgaaaaggaagaagcctttcgttttcttaaataaaaaggtgccgatgccgaatgcagcaagtgatacgacaatcccaaaataaggactcattgtgctttccatgtgaagaacctcctgtttcccttaatggtgaacgagttcgttattgttctgcgggctttgcactgtttttgttttcatgtccgctgcggttttgcgttttccgctcagcgacagaatcagctgagaaaacaatcccgtagcccccagcaaaataatcgttgcgagcagaatgacaagaacaatttgcaggccgtattgctgcatcacaccgagcgaattcataacagatatacctgacggaacaaataaaaatccgatcagagaggtcaaagacgttccgagcgtctccacttgttccagtttaatgactttcaaacataataggagaaataataagaccaaccctacaaccgatgccgggataggtattgggacaatagcggcaatcatatttgaaaccagcataatgacggcaaaaataaatgcttgtgttaaaaacccgtacacttttttagcactcattttcttcacctctttctctttggtacccccattataaataagaattccctgttataaagcgcttacaagataacatgccgaatagcgggtctgagttgcagaatcaaatggctgaaatgcaaaaagccgcccatcaaatatggagcagctttttcaattccttcgcatatgtccggctgaccggtattttcgatccgtctttcatgatcaaattatacgttgaattaaaccatggctgaatttctttaatatattcggtattcacgacaaagctccgatggacgcggataaaatcagaatccggcagctttttctcaatcacaacgagtgtatcgctgaccgtataagaatgatcgaaggtttttacattgacatgaccatcttctgttccggcatagataatgtccttcgtatccacaatcacaatcgattcccccacagatagcgcgagcttgtgctggccggcatggctgttttgctctgtttctacaatatcccgattgacttttttatattttttcagcgtttgctgaattctttcttcatcgaatggcttggttaaataatcaagagcatccacctcaaacgctttgagtgcatactggtcatacgctgtcgcaaacacaacagcaggaggatgcttcattttcttcaatcgctttgcgatatcaaaaccgttttctccagataaatcaacgtctaaaaacagcaaatcaggtttttgatccatcatttggtcaaaagcggattcgatattttccgcttcattgatttccatttcctcattggtccgcttaagcaagtaagccagttcatctcttgccagcatctcatcatcaactattaacaccctgagcatgttcttctccctctttcatctgttgcattggcacttgaaaggaaacctctgtccctttatgaacctcactgctgatatgcagtgcagcctgctgtccgaataaaccgatcagccgctgatttaggttataaagcgctgtaccggttccctccttagacggaaacggtttctttcccagttccggcaagacgtccggcggaattccgcgtccgttatccgccaccttcatatagacggatgcattatcagataagacacagactgtaaccttgcatatgtcttgttttttcggaaacgcgtgccgaagcgcgttctcgacaagcacctgcaaaacaaacggagggatttcaatctgctccagtctgctgtcgatattaagctcaattttatatttcccgggaaaacgcgcctgttctaatgacaaataggcgttaagatggtttagctcctttgagagcggaatcagcagctgtctcgctccttgaaggtttgaacgaaaataaacactgagctgcaataggagcttacgggttttttcaacatctgtacggcatagcgcagaaatcgtgttgatcgcattaaataaaaaatgcggattcacctgtgcttgaagcgctttaatttcagcatccttgagaagtttgctttgcagctctgcttccccaagctcaagctgtgtcgaaaacagcatggccagcccctcggcaagttcctcctctacctgactcaggcctgccgggcttttaaagtacatttttaaggtgccgattgtattgccgttcgatgtcagcggcagaacaattgcagcgtgcaaagggcattcagcatgcgtgcattcaatctcttcctgcgaaatcgccttcataatatgccctgttttaatcacctttttggacagcccggtgatcaaacttttcgatgggatgtggtgatccattcccgcaccgacatgcgcaaggatcttttctttgtcagtgagagacaccgcatctgttcctgtcagcttatggataatagccgctacacttttacaggagttctcatttaatccttggcgaaaaaatggaagtgtctgatcagcaatcgtcagcactcgatgcgtttcgagagcccttgcctgttcttccttgcgaatgatcgcttgaataatagacagaaaaataaaactgcctgttccattgatgagtatcatcggaattccgatcatgctgacaagctcccaagcgtcactgaacggctttgccatcagcaaaataatgatcatttgcagtgactccatgccgattcccacaagagcggcgatgcgcggtgtcggcattcgatatcgcttcgtaaaatacctgccgatcaagcctgcaagaacacccgctaaaatagatgagacggcacagcttaaggccgtgctgccaccgagtgaaaaacgatgcaggcccgcaagtatgccgatcccagcccctacaaaaggacctccgagaaggcccccgatttccacgcccaaaatacgggtattcgcgatagagcccgatggatctatcgtaaacacccagtcattgtttacaatcatatttctttgaatttcgatgcctgtataattgctgatgatgctgaaaagagaaaaaatagaaattaaaatcgcttttcctttatagccgtcctgattctgaagagcttgtctgaaaagtttcgtatgggcgagaatgaaccctaatataacaataatccccactctctccagcatcataatcattaaatgaatcattcatgtcacctgttctttccgttttcattctagcatgttttcgttttacggctgactgtttttttaaaatcgtctgaaaacatatttcacaaggcttttatctattgtaaaataaaacatgagccttttggcagaaagatttgaatctgaagcagaggagaagatcatgaaagccgtattttttgatttagatgatacactactttgggacgaaaaaagcgtcagaacaacatttgcagaaacttgcttacaggcggagaaaaaatatggccttgcccctgaggaattcgaagcagctgttcgcgaagcggcgagagaattgtacatgtcatatgagacgtatccatatacagtgatgatcggcattaacccgtttgaaggactgtggtccaatttctcagagccaatcagtgaaggctttcaaaagctgaacaagattgtgccggagtacagaagaaatgcatggacaaacggactgaaagcgcttgggatcgatgatcctgcatatggcgaatacttgggagagttttttgcggcagagcgcagaaagcgcccgtttgtatatgatgaaacttttgctgtactcgatcaattaaaaggcaagtatgaattattgcttttgacaaatggcgatccgagtctgcaaaaggagaagcttgccggcgtacctgagctcgctccttacttcaatgaaatcgtcatctcgggcgcattcggcaagggcaagccggatgtttcaatttttgaacactgccttaagctgatgaatattgaaaaagacgatgccatcatggtcggcgataatttgaatactgatattttaggcgcttcaagagccggaatcaaaaccgtttggatcaaccggacggataagaaaaacgaaactgacgtaacgcctgattacatcatcagcagccttcatgatttgtttcctatattagagaaataaaaaagcatgatctcttcaacgagatcatgctttttattttattttttcgcttcagctactgcctttttcacaaactcatcaagtgaaatggtttcagagttctgctctccatacttacggacgtttaccgctccgttttctgcttcttggtcaccgaccaccagcatgtacgggattttttgcatttgcgcttcacggattttgtagccgattttttcatcgcggctgtcgacttcaacacgcaggccttcacgctgcaggcgttcctgcacttttttcgcgtagtctaaatgcacagccggagaaaccgggatgacttggaactgaaccggtgcaagccatgtcggcagcgcgcctttgtgttcttcgattaagaaggcaacaaagcgttccattgttgaaacgacacctctgtgaatgacaaccggacggtgctgcttgccgtcctcaccgatgtatgtcaggtcgaaacgttccggcaataagaaatcaagctgtaccgtagacagtgtttcttcttttccgatcgcagttttcacctgaacatcaagtttagggccgtagaatgccgcttcaccttctgcttcgtaatagtcgtggccgatttcgtccattgcctctttcagcatggattgcgctttgttccacatttcatcgtcatcaaaatatttctctgtatcttccggatcgcggtaagacagacggaatgtgtaatcacttaaaccgaagtcttcatatacatcctggattaaacggactgtacggataaactcatccttaatttgatccgggcgcacaaagatgtgtgcatcatttaacgtcatcccgcgtacgcgttgaagccctgacagcgcacctgacatttcatagcgatgcatcgttccaagctccgcaatacgaatcggaagctcgcggtaactgtgaatgtcttgtttgtaaatcatcatatggtgtggacagttcatcggacgcaatacaagtgtttcattgtccatttccatcggagggaacatgccttcctgataatggtcccaatgccctgatgtttcatacagctctttgctgccaagcacaggtgtgtatacgtgctcatagccgaggctgatttctttatcgacaatgtaacgctcgatgacgcggcggattgtcgcgccttttggcagccaaagcggcaggccttgtccgactttttgagagttcgcgaacagctttaattctttgccgagctttctgtggtcgcgttctttcgcttcttctagcatacgaagatgctcttcaagatcagcttttttgaagaaagctgtaccatatacgcgctgaagcatttggtttttgctgtcgccgcgccagtatgcgcctgcaaggcttaacagcttaaattctttgatttttccggttgaaggaacgtggacgccgcggcacaggtcaaagaattcgccttgctcatagatcgaaacggtttctccttcaggaatcgcatccaatagttcaagcttcaggtcgtcgccgatttccgcaaaacgggctttcgcttcttcacggctgacttcttttcgaacgatcggaaggttcgcattaacgatttttttcatttctttctcgattttcggcagatcctccggtgtaatcgcttcgtccatttctacatcgtagtaaaacccgttttcgataaccggaccgacgccgaatttaacatccttgtagatgcgtttaatcgcttgagccagcaagtgagccgtactgtggcgcataatttgaagaccttcttctgagccttctgtaatgatttccactgtaccgtcttcattgatcggcgttctcaaatcgatttcttttccgttcagttttccggctaatgattttttctttaatcccggactgatggatgccgcgatatcttctgttgttgttcctttcgcaaactccttgactgctccatcaggaaatgtgatttttaccatatctgacatctttgtcactcctttttttgcatataaaaaccccgccccctatgaaagggacgaggttgaataaacggaatcgtggttccacccttttttccgcaaagccaatacggcacctgcggctctaagctctgtaacgggagttcccgtcagccattactgttccttttcaagaggttcacagctgaagttcaaaggcggtaaagcgaatggtccttagctgggaagcttgcagccagggcttccctctctttgagctggtatcattccttcgtgtccttatcaatacgtgtgtctttcttaatctcctatgtattataaattgttcaatccaaaaaatcaacacgatcgcgtttccttttttaaaccgacagccttaaatagacaggctgccggccctcatccttccgagtgcttcaccggtatttctgcatctgtaaaagcatgcagcgggagcatttccactctctcttgaaatacgttttgaatggtccttgccatcatgtgctcgggctggtcggtataaagcacgacttcatcaggcgcaatggaaatcagcggcgcgagcaaatgagaatcaatatacataggatgatcccggacaaatcttctgtctatgtatttcattttttcccgttccggcacatagcgcagctcccataatgtaaaggaaccatcatggacaatatgcacttttttgattcgcggctgtttggcgtccacatagtctctgagtgtttgaataaagttttgatattcctgttccatcttatattcatcaatcgctgcttctgtaatatctctcagctgcttatagtatgatccaagtcggaaggtctgaaaggagcgaatgtaaaatactccttcctctaaacagatcgtttggagttcatccaaaattgattgtttccgtgaaagcttcagcggctcaaacggaagatcgtctgcttcaccttcaataatactgtgtgcgagctgaaggatttgctgctgttcatcctggtccgtgaaacaataagtttcctcaatcaatgacagcatatgctcgtcttctttgcattccaaaaaaaatttgaccagaatcggctccataaaacgctgaataggaaaagccggattcgctttttcaatcccgatttttcgtatgccttcacggacaatgatattgttccgatcgtccgaatgctgaatgagatgtaaaaaagcggctgcatcatggtcatcttcaaagattatttcaagcatgtttgtccccccttacggcatctgttacaagtatatgggggatgtttttaaaatagacgtaaaggtcattggcaaatcttaatttgattcttggaacaagttttgcattttctttctgaagatgaacggcaatgagataaacacgatatacaaagcgagcaccataaagaaagcgggcagattgccagccaaaaagctcgcacccagcacattaagcgcaatcgtcccagggatgattcccacagccgttgcggcaaaatacggcagcgctttgacattggaaaggcctgccgcatagctgacgaaatcaaaattgatcggcaggattctcaaaagaaagatatagaaaaatccgttatcctccatttgcttctgtatggcttcaagcctttcgtaatgcccgttctttttcgccgaaaacaaaccagccgcaaaaaacgaaacagctgaagcgcacatcgaaccgaataacgtataaagcgtgccgagaagcgggccaaacgcaagtccgccagctattgaaataacagacaccggaaataaaacaagtggcctgacgatggatatcccgataaacatcagaggtgcaaagactccgaacgacaatacccataccctgatttctttcggcgatacattcaaatacgttttatttccccaatagagtaaaccagcacctgcaagcactgccagccatttgacagccgtttttcgtttcataccctcagttccttcccctttgaaccacagcaattatggatgtcggcggttttctccgtcaaggcggatcggagcagccaaatataatatccgctccattaatcttgcagcttttacttcttctttttctcccctctgcgaatacgtaaaatgatgcttcagctcgtcaggtgagaaattagaagaaaagaacgttggcagctgctgggacattctgtgctgaagcaccgttccgatgacctcatcccttacccagcttgtcattgattctgctccgatgtcatcaagcattaatacgggtgtggtctttaccatattgagcttctcttccaatgtctggtcttgcagcgaattcttaagctctctcacaaattcaggcacataaacaatcatggaggaatactctttttccgccagctcattggcaattgcagcgagcataaacgtttttcctaccccaaatttcccgtataaatataatcctttcccttttcccgtctcattatagcttttcaggaagtctgtaacatgctgaaacatcgcgagtctgcttgggtcactgatatcaacttgctggaacgtcgctccaagaagatcctgctggatatacatgcttttcataagagactgttgtttcttctgctggtcgagcttccgtttgactggacattcgtaatactcgatatcaatagacctcccattgacaacaagcttcggatggtagccctccaacaaattgttgcagttttcatcttccgaacaataggagcaattcttgctttgttcgatatattcataaagcttatttaagctcttttcgatcattttttggtcaatcacttcttcgttttccttcaaaaatgcttgaacatcttgatctttcatgactttttccttcatttgttcaagacgtttttggaaatccggcctgccggttacgccctgcagggaacggccgattggttccatctattccttcaccccgcatctctgtctttaataggcagagtattttttcagtttttgcatttcttccatcatctttttcttctgttcttccaaatcctgcggatgcagcttctgctgtccggattctgaatcggacgctgtttccttttctgtcatccaatcaggaagcttttcttcacgaatcactttttggtttcgtttcgaagactttgtttttccctcagcccattcaagatactggcggttttcttctattgcgagcttcatcgcttccctgaccgttttcacctttttgcgtgcccaatgcgaagcgattttttggatatagtttttcgacagcttcatgtcggttttcagcatgacataataaattaacacatttgtgacgcctggctcgagcttctgttcgaacataatttcttctatgatcttcagatcagcttttgacggctctgttccgtcagcaatgtcctgcagaagcttcttcggggaaatcgcctccagcaatgcaatcagcttcccatccagagaatcctcttctgccggtttttcgccttcacgcagatgcaccggctgtgttttttccaccaaatcgggcagctgtccgtttctttcaatttgataccagtcgctcgccgcttttcttaatgcctccgtcgtaatgacgtcacgctcatcaattgcgctcatcacaacattttgcatttgcaaagggtcaattccgtacagataagaaagctttttgattgtgtcccgcacctgctgggtcatcgcttttctcggtatcatcgtctcagaaagtcccgctaaaaacaaatcaaaatcaaacacatcctccgttatggtgtaggacggagactgtccgacagaagtatactcggacccctcggcaagccttaccgtttcctccatatcggatgtgagcttccattcactcggctgcagcgattcaaacgcatgattaaacggacgcgtaatgtccttcgcatcttctgaaatggccgggtgcgtaaaaaattgttttaattgctgatatttcgtttttccgaccctattatacagaaaaacattcagcattccgtcttcaaaaaattcatttggtctgagcggcggaaggagttcatatataaagaggcgctcctgccgctcggattctttcatatatactttcagcaatccgatgccctcgagcttcccctgttcctgatggatcgtttttaagttggactgtgtcatcgccatcagctgtctatgtgtggactctccgccccacagacggttttgttcaagctctccccacaatgtcatataaagagagaatgcaacagggccgattaagggctggtacagttgtgtaataatttgtctgtcaatatcctgcagcatcgatctgcttttaaccacatacgggtctacaggcagtacatctttccaatagtcagccatacattctcaaaccttccgaatttgtttctacctttcattttacaccgtttcttatatctatcaaatgccaattttgcacatgagaaaagagctagaagaatcctcttagctcttttaacgctctttctttattaagtcttttaattcatcgataaagacgtttatatctttaaactgccgatagacggacgcgaaccgcacatatgcgacttcgtcaatcttagccagccggtccatgaccatttctccgacgagctcactcttcacctcggagcagccttgattgcgaagttctttttcaatatcaaagcacatgtcttcaagcgttttgagtgaaacaggccttttttcacatgcttttatgaggccgcgcagcattttttctctgctgaattcctcacgcacaccttcttttttcacaacgatgagcggggtttcctccactttctcaaaggtcgtaaaccggtagtggcaggattcgcactcgcgtcttcggcgaatcgactttccgtcatccacaggccgtgaatcaaggactcgtgttccgttatgctggcatgaaggacatttcaataaaatcagctcccaactatatcgttccctgcaatgtattttcggcagcctccgccttttaaaaatagatgtgacagcatctgtcgggagagccgttgttaaatttgtttctatagcattaggtggtttgtgaaaatctccttcttattttacaaaaaaaatgaaaaaagaaaaagctgacactctcgtttctttataaaaataaaaggagcataagctaaaaagcgcataatggctttctagcttcagctccctttgtgttcgcaatttactttatagtactttcgcttgcgcctgtttaatttgcacaggccccattcctcttggtatttcaatgttttctcttgtatcagcatgtaatgcctctgcaatgtaatcagcagcgacattaggatctaagtctccacaagtataaacatcaatgctcgcatatccgtgctcaggaaaactgtgaatcgttaagtgtgattcagaaataatcacaactccgcttacgccttgcggtgcaaatttgtgaaatgcaacctcgcgcacctcagcacctgattttagagcagcatttacaaacgttttttcaataaaatccatgtcattcagcttatcaaaatcgcatccccatagctcggagataacgtgacgccccattgtttccatagtcatggacccccttaacaagaattaaaaagtgaaattccaacaactgggtcggccatttaccacgggggaaagttagtccggagaggtcctaaccctttaagtaattccgaaacagtctcaagcaagaagttcacgaaaaatagtatactgtgtttaagtctaatttgcaaggtgcgttttttcagaaatatgctgttaagggttttttctttaaaatgtgtccatgaccttattttatacagcagacggatgtttcattcgtgccgctacatggcggattagatcaacaactctgcaggagtagccccattcgttgtcataccacgccagcacctttactttcctgtcttccattaccattgttgtaagcccgtcaatgaccgctgaatgcggattcgtattataatcagtcgaaacgagcggttcatctgagtaatcaagtacaccgtacatcgacgttttggcagcgcgtttaaatgcctcgtttacttcttcagccgtaacatccgttttcagatcaacaacgagatcaaccaatgagacgttcggaacagggacacgcaaggcgaggccgtgaagttttcctttcagatgcggcagcacaagcgaaagcgcctttgccgctcctgttgttgttggaatgatggattcaccgcaagcccgcgcccggcgcaaatctttgtgcgggttatcaatatttttttggtcattcgtatacgcatgaactgtagtcatcagaccgctctcaatgccaaactcttcatccagtacttttacaacaggcgcaaggcaatttgtcgtgcatgacgcatttgaaataatgacatggcgctcagcgtcgaattggtcctcatttacgcccatcacaatggtaacgtcttcattttttcccggagcggtcaaaatcactttttttgcacctgcttctatatggcccatcgctttatctttagcattaaacttccctgttgcttcgacgactatgtcaatatcatattcccgccaaggcagctgttttggatcacggctgtttaacaaaagcactttctttccatttacgatcaggctgtcttcaccagccacaacctctttgtcgtatctgccgtgaattgtgtcatactttattaaatgagccagcgtttctgcggaatagctggcgttaatggccactacttgaatttgatcgtctaacatcgcttttctaaaaaccattcttccgattcttccaaacccgttgatcgctacttttaccttcatgttggacaccccttatcaattatgccatcctaatttgttactatctaaaattagtataacacattaaaacaaattcgccagtacatattgataaaaatcaacgattataacgctaatttatgatgcatcttatgttttcttgcacagaatatcaggcgtaagaaccaaaaagcagccagcgctccgcactgactgccctcatgctttatgattcctgttttaacttatcattgagcacactttcttctagcacagaaaatgtatccccgtatactctgttaatatgattcgctccccaagcacacagcatatctaaaattccttctaagctgcggccgtattcgctgagctcatattccactttgggaggaacttgattatatacgattcggttaatgacaccgtccgcttccagctcgcgcagctgctgagtcagcattttttgcgtgatattgggcattaggcgttttaattcgcttgtacgtttttttccgtgcgtcagatggcataaaatgacgcatttccatttccctccaatcacttcaagagtcgcttcaacagaaatgttatattttttcttctccatacaatccattctcctcacaggcaccaaaaagtgactatagcacttcaaagtacgtacttttatttcttaacgatatgtttcataatcacatttgccggctgatttgaatctgctcttttttatttatatagcttactcggcagaatttcaatcatacaacacatcttacaaaggaggaacatcatgacttcagccaaaagcagtattcctgcactactggctttggccgtaagtgcattcgcaatagggacaactgaatttatcagtgtcggccttttgccgctcattgctgatgacctgcatattccagtcacgacagcaggattaaccgtttccctttatgcgctcggcgttacatttggggcacctatattaacttcattgacctcaagcatgtcgcgtaagacactattgctttggatcatgtttatttttattgccggtaatacgatggcagcaaccgcttcaagcatcgggattttactagcagcacgtgtgatatcggcattttcgcacggtgtgtttatgtcgatcggttcgacaatcgcagcggatattgtcccggaagataaaagggctagcgcgatttcaattatgtttactggcctcactgtggcaactgtaaccggagttccttttgggacatttatcggccagcagttcggctggcgtttcgcctttatggtcattatcgccgtcggaatcattgctttcattacaaatggtattcttgtaccgtccaaattacgaaaagggacgaaaacaacgatgcgggatcaattgaagcttgtgacaaacagccggttattgcttttatttgtcattacagcgcttggatacggaggaacattcgttgtgttcacgtatctgtctcccctgcttcaggaagtaacaggcttcaaagccgggactgttgcagtgattctgctcggatacggaatagctattgctatcggcaatatgattggcggaaagctgtcaaaccgaaatccgattgccgctttattctatatgtttatcgtacaagcaattgttctattcgtactgacatttacagccccgtatcaaacagcagggctcattaccattctctgtatgggattgctggcctttatgaacgtgcccggccttcaggtgtatgtcgtcatgctggctgagcgttttgtcccgagtgcagttgacgtcgcatccgcgatgaatatcgctgcctttaatgcaggaatcgcgcttgggtcataccttggcggtgtgatcaccgattcaatcggattgattcataccgcttggataggcggattaatggtggtcggtgcagtcattttaacaggctggagccgcttaatggaaaaacgagatcggcaggaagcctgacaattttaaaggaggaaatgaacatgacaacacatttacaagcaaaagcaacacttcataatggggtagaaatgccttggttcggcctcggcgtgttccaagtggaagaaggatctgaactggtaaacgcagttaaaactgccattgttcacgggtaccgcagtattgatactgcagctatctatggaaatgaagctggcgttggagaagggattcgggaaggcattgaagaagcaggcatttcaagagaggatctgtttatcacatcgaaagtatggaatgcggatttaggctacgaagaaacactcgccgcgtttgaaacaagcctatccaaactcggtctggattatttggatctatacctcatccactggcctgtagaaggaaagtataaagaagcttggagagcgcttgaaacgctgtataaagaaggccgtatcaaagcgattggcgtaagcaacttccaaattcaccatcttgaagatctgatgacggcagctgaaattaagcctatgattaaccaagtggaatttcacccgcgcctcacacaaaaagagttgataagatactgccaaaatcagggcatccagatggaggcttggtcacctttaatgcaggggcagctgctggatcaccctgtattggctgacatcgctcaaacatacaataaatctgtcgcacaaattattttgcgctgggatctgcagcatggcatcattacgattcctaaatcaacgaaggaacaccgcattaaagaaaatgcaagcgtatttgactttgaattaacgcaggatgacatgaaccgaatcgatgcactgaatgaaaacttgcgagtcggtcctgatccggacaactttgatttttaatggcaaaaaaacaccgttcaatatgaacggtgttttttgtattatgcccagctgttcatgatttcatcaagctgccttttggtctcttcaagcgtgccgctgttatcaatgacttgatctgctcttgctgttttttcctctaagggcatttgagagcggatacggctgactgcttcttcttccgtcagctgattgcgcttcatcagacgttccagttgaagctcttttgtcacactgaccacaataattttatcaaccaatgattccaatttgctttcgaacaatagcgggatatccaatacaacaaatgcctcccgatttgcaacggcttcatcacggcgattgagcatttcctgcctgactgcgggatgaacaattgcatttaaagcgagacgcttttgttcatttgtaaataccagcgctccaagcttttttctatctatatcgccatttgagagcagtatgtcttcaccgaattcgtcaatgatttgccggtaggccggcatccctttttctaccgcttgttttgcaatgatatctgcatctataactgttattcctttttcaatcagcatattggctaccgtgcttttgccgctagctattcctcccgttaaaccaatgactaaggtcaagagatccactcctttttacaatttccagagcccaatcgtgattaacagaagccccggcaaaaacgccattttatcgatccatttccacttagacagaaaatggccggcattggttccaattgatacaaacagcgagctcatgattgccacggcgatgctcatcacaatcggtgaaaaaccgagaatggctgcgcctatgcctgctccaaaggcatcaattgataaggcaaatcccaataagaccgcctcaattccattgatcacacccgatttgtcgatatccgcactcatgggttttctcaaaatatgaatcacaatccctaatgaccgaacctctaaattaagcagcgttttttcatgcaataggtattctttatcttttgccggtttgaagaattggtacagaacccacgcaccgattccaaccaatatcaaaccgccaagcttctccgtcacatatacaggaaaaaacttcgtgagaaagcttccgatcagcatggatataaacatgacagcaccggaacagcaggcgataaccaaaatcgctttaaacggtattttcatttttctcaatccgtacgtaaatccgactgaaaaactgtccaagctgacagccaacgccagcagcagtatagaaaccatttgcatatccgtttcttcctttctgttggtgctcttgtatcagatgtgaaatgcccgggattcatcacaatcatatatatgggaaagtgaaaaatccgtgtttcgaaaatggcatcctccattacagagttactgatatatgcaccgacagcttggacgatgaagcattatgctacttttttttctggcactttgcgcaaaaatgcgtgcctcttcctccaacgacaattttcgaaatcatcgttccgcaatttttgcatggctcgtctttttttccgtacacaaaatgctgcagctggaacattccgatttccccttgggagttgatatatgaacggactgtgcttccgcccgcatcaatcgcctcctgcagagtgtttttgatttcagcgtgaagggttttgattgttttatctgataattgatttgcttttatctcgggatgaacacccgctctgaaaagagcctcatccacataaatgtttcctagtccaactaccgttttttgatccagtagggcagttttgacagcgcggtttgttttcgcaagccgttcttttaaatacgcactcgtaaattcttctgcatccggctccggacctaactgagaaagcgggagctcgcccgcttcttctcccggtttaaataagtgcatggttccaaatttccgcacatccctgtaccggagctgggttccatccgtcatcgtgaatatgacatgcacgtgtttatcgtcaggctcctcggcttgatgaagaccgtattttccttccattcgaaggtgagaaaccataacataatgatctaaatgaaacagtaaaaactttccccgtcttccgatggactgtatcgtttctcctgctagttttcgcgcaaattcctccggttcggcaggccgtttgatgatattcggccatctgatctctaccgatttgattgtttttccctttacaagcccggtcagagtgcgccggaccgtctcaacttctggtaattccggcacatccatcacttcctatctctgtttatttcgcatcgtaccaagatgggcctgatgcaaagtccacctttaacggcacatctaatgcaagcgcatgctccatcacttcaggaacaagcttttcaagaatttcaatttcttcctttggcgcctcaaaaatcaattcatcgtgtacttgaagcagaagccttgctttcaactgtttttctttcagcttggcagccatgtcaatcatggcttttttgataatatcagcggcgcttccttgaatcggcgtattcatggccgtccgctctgcaaaacttcggatattaaagttccggctcgtcagctcagggatgtagcggcggcgatgcataagcgttgttacgtatcctttttgcttcgcttcctgtactgaatcttccatgtacgcttttacgccttggaagctttccagatagcggtcgataaatgctcccgcttccttccgggtaatgccgaggttctgtgacagaccgtaatcgctgatcccgtaaacaatgccaaagttgaccgctttcgcctggcgtctcatcgcagatgtcacttcatccttagcgacatggaacacatccattgccgttttcgtgtgaatatccatatcatttgtaaaagcttcgatcagattatcatcctttgaaatatgggcaagcacccgcagctcgatttgtgaataatcggctgcaaaaatgagccagtctttttcagacggcacaaaagcttggcgaattttccgcccttcctcaagcctgatcggaatgttttgcaggttcggatcagtcgagctgagacgaccagtttgcgttaaggcctggttaaatcgcgtgtgcactttatgcgaatccggtctcgtcacctttaaaagcccttcgatatatgttgattgaagcttgccaatttgtctgtactgtaaaatatagtcgacaatatcatgcttgtcagccagcttttcaagcacatcggcagacgtagaatagcctgttttcgttttctttacgacaggaaggccgatcttttcaaataagatgacgcctagctgtttcggagaattgatgttaaacggctctcccgcaatctcatggattttttcttcatattccttcagcttcgcacccagttcttcacccatccgttttaaacggtcaacatcgactttgacgccagttgattccatttcgccgagaataagcgcaagaggcatttccagctcttcaaacagttcaagctggtcgttgttttccagctcctgaacgagcttttcccgaaggctttgaatcgctaacgctttgcggccaaggtgctcagacagtacgtcttctgacggcactgctcgttttgctccttttccataaactgattcatcacttgaaacgatatgcaagccgtaatccttagccacactcgcaacgtcgtcatatgaattgcccgggttgatgatataagccgcaaggagcgtatcaaactcggctcctttcagctcaatgccctgccagcgcaaagcgacaacagcccgcttgctgtcgaagacccatttcttctgctcgtcattttccacccattctttaaacacctcagactcaacggcagtgtctttcggaatgaaataagctcccttttcatttacgatcgaaaatccgagaatcggctcttcatgataattatcgccaatctgttcaacgacaaatgcggatggagaaaccaatatatcgcttgtcacgtctgtgactgttttgacattaatgtcttccaacgattgatcctgttctgcttctgcactgtcttctccaagccgttcaagaagcgtgttgaagccaagatctttaaagatggcaatgacctgttcacgattaaagccttgatattccaggccggaaacagatacctcaatcggagcatccgtcataattgtcgcaagctccttgctcatcaatgcttgatccttaaactcctcaagcttttccttcaatttctttccgctcacctcgtcaatggactccagcagcttttcaacggaatcaaattgttttaaaagcttaatcgcagtcttttctccgacgccgggcacacccggaatattatctgaggaatcgcccatcagacccttcatgtcaatgatttgttcaggcgtaagcccgtatttctctttgacatgctccggtgtgtaaaattcaacatcggtaattccctttctcgtaatggcaactgtcgttttgtccgttgccagctgtgttaaatccttatctcctgagaaaaccttaacttcaaatccgtctttttcagccgatttggccagtgtgccgataatatcatccgcttcatattgttccagttcatagcggctgatctggtaggcatccagcagctcgcggataaacggcatttgttcggaaagctcaggcggggttttctgtctgccgcctttatattctttaaatgtgccgtgacgaaatgttgttttcccggcatcaaacgcaaccagcatgtgcgtcggtttttcatcctcaagcattttcatcaaaatcatcgcaaagccgtatacggcatttgtatgaacacctttatcattgcttaacagcggcaatgcaaaaaacgcccggtaagccagactgtttccgtctacaagcactaatttttttcgttccgtcattcaatttcctcctaagaagcctcaggcttccattcatctcttacatagtcattagctcctcttattttaacaaagttcaatttgaaaggaaaatacgtgaactataagagaagacacaaaaaaggacgggaacacaaataggttcccgccgtcaaaattggctccttggatgaaggggttctactacatcctaccagcataggtttaacagtgcatgaagatattgttaaacctttgtaaacattaggcggacttttcagcggcccgtttcagcgtcacggtaaagacagttccccgtccaggctcgcttgtgacatcaattttcccttcatgagcctctattaaatgcttgacaatcgcaaggcccagtccggttccgcccgaattcctgcttctgtctttatctacgcggtaaaagcgttcaaagatgcgcggaatttcttctttctgaattccgattccagaatcagcaacctcaatctgaatgtctttttctctgggctttacattgatagccacggagcccccctcaggcgtgtaggttaacgcattgtttacgagattaagaaatacctgtttcagcctgtacgggtcaccagatacatattgagggtctttcggggcattcagttgcaaggagatgcctttctcatccgccttatgcttcagaagcgtttcaatctcaccaagcattttggccggctcaaacgtttcgatactgagcgtgaaattttgctgctcgatttttgagagatcgagcaaatcctgaaccaaagactgaagcctttcgctttccttaagaataatagagagaaattcagaaagcgcctctttgtcttccatcgccccatccaataacgtctccgtaaacccttttatggacgtaatcggtgttttcagctcatgagaaacattggccacaaaatccttcctcatctgctctaatttctttgtttccgtcatgtcatggaaaacgagcacaattcctttccattcatcgtccggccccataatcggaacgccgtccacttcaaaataacgccgttctattttgatcggaagtcttaacagcttgcatttctttgtctccgtcataaaaatgtcttcgacaagctggatcacttcttcatgttcaaatgcatcgtgataaagacggcgcagcatatgattcggattgatatgaaactgcttggcgtaagatctgtttacgagattaataaagcctcttccgtcgatcataatcagcccggagccaatgttttcaatgactgtcagcagccgatcccgctgcatttcctgcgttcgcgtcatttccatcagatcaatggcaaggctgttcatcgcatgtcctagcttatcagaacgcctaatatagccgccgtacgtccgtgcatcgtagttgcccttagagagttctgtggctacatttgtcgctgactcaattgaccttttataacgtgaggtcatgctggaataaaaataaacaatgacgataaatgcggtacaaagactggccgtcagcatcccccacaattcgccttttaagccgtcgcttttttcagaggcggaaagcagcacatatcctgttttttccccttcgcttctaagtgaaagtccgtaataaagcttgttatctgttgttgacagaataccctcatggccagaaacaagcgcctgcaccttttgggaatcagccgctctcccgttagacccatacagcaccttgccgtctgtatcgataacggatgcgctcacatcaagcgcgccgcctgcatctttaatgattttctcatttgtttgattattcagattgccggcatcaagaagcgaagccaagtattttgcttctttttcaatgtgttcctctgctttcctttgatcagatgtttcaaaaagctgctgtaaaaacagcccgagaacacaaaacaccagaatcatacagacaacgaatacagaaaaaaggcgcacacggtatttattcattcatttttggctcctccagtttataccccaatcccctaatcgttttaatgtagatcggttttttggtattgttttcaattttgtcgcgaagatggctgatgtgcacatcaacaattctcgtatctccggcaaaatcataattccagactgcgctcagcagcagatctcttgtcagaactctgcctttatgtctgcctaaatagagcagcagttcgaattctttcggtgttagttcaagctgactttctttaaagtacgcttcataatgatcaggcaggattttcagatcgccgattacgatctggccttccatttcatcgttcttcatctcactagagggcgcagctatttccgaacgccttaaaatcgctttgactctcgcatttacttctcttggactgaacggcttggtcatataatcatcagcaccgagctcaagccctaatactttgtcgaattcctcatccttcgctgtcagcattaaaatgggaaacatcagtttttgctgtctcagctgcttgcatacttcgattccgtccaattttggaagcatcacatcaagcacaatcaaatcaggcttctctgtttccgcttttttgagtgcttcttccccatccgaggcggtaatgacatcatagcctgaccgttccaaattgtactgtaaaagagtaacaatagattcttcatcatccacaactaaaattttcttgttcatgctgtgcctccagtattataattccccgacatcctatttctctattttatgtcatcttaacatgtttcatgattttattttagcgaaagcaggacattccgacaattcgccttttacatcatttttaaaagaaataaagacgtttatgataacgctttcatttatagtaaaaagagaaaggctgtattaagcaagcctttctctctttttattaggataatactttcatgacatttttgacagattcaactgatttattcagctgcgctctttcatagtctgtcagttcaagttcaatgatttgctcaagaccgttgccgcctacaattgtaggaacaccaaggtagatgccttcatagccgtattccccttcaagataagcaattgtaggaaggacgcggcgctgatccttcaagatcgcttcgaccatttctgtcagagaagccgcaggcgcataatacgcgcttccgtttccaagaagattcacgatttcgcctccgccttttctagtgcgctccacaattgcgtcaatccgttctttcggaataagagtttcaagcgggataccgccagcataagaataacgcacaagcggcaccatatcgtcaccgtgtccgccgagtacgaaaccagtcacatctttcactgacaggtttaattcctctgccacaaatgttctgaatcttgccgtatcaagcacaccggactggccgattacacgctctttagggaagcctgattctttgtacaccgcgtatgtcattgcatcaacaggatttgtcagcaccacaataatagagtcaggagaatatttcacgatttcccgcgtaacgcttctcataatcttttcgtttgtagagaccagatcatctctgctcataccaggttttcttgcgataccggctgtaatgacaacaatgtcagagccggctgtatcctcgtaattggatgttcccgtaatttttgcgtcaaagccttgaaccgggcttgcttcaagcatatcaagcgcttttccctttgtcgggttctccaattgcggaatgtcaacaagaacaacgtctgccagctctttttgagcgattaaaaatgcagttgtagctccggtaaaacctgctccgataacagaaacttttttacgagtatttcccatgtctctcttctcctttatggctagttttaggctttttccttgcttagtccatgtttttgatcagttcttctccgaactctgaacatttcacttcagtcgcgccatccattaatctagcaaaatcgtaagttacgactttggaagcgattgttttttccatagatttgataaccaaatcagccgcttcgttccatcctaaatgctcaagaagcagaacgcctgaaagaataactgaagatgggtttactttatcaaggcctgcatatttaggagccgttccgtgcgtcgcctcgaaaatcgcatgtcctgtttcgtagttgatgttcgctccaggagcaatgccgattccgccgacttgcgcagcaagagcatcagaaatgtaatctccgttcaagttcattgtcgcaacgacatcaaactcgtttggacgcgttaagatctgctgaaggaaaatgtcagcaatgctgtctttgataatgatttttcctgctgcttccgcttcgctttgcgctttgttggcagcgtcttttccttcttcttcagcaatgcggtcatattgagcccatgtgaagactttatctccgtattctttttcagcaagttcatagccccagtttttgaaggcgccttctgtgaacttcatgatgtttcctttgtgaacaagtgttacagatttgcggccatgctcgatcgcataatcaatggcagctctgaccaagcggcttgttccttcttctgaaacaggcttaatgccgatacctgatgtctcagggaaacggattttattgacgtttaactcattttgaaggaagctgataagcttttgcacttcttcagagccttttgcatactcgatgcctgcgtaaatatcttctgtattttcacggaagatgaccatatcagtatcttcagggcgttttaccggtgacggcactccagtaaagtatcttacaggtcttaagcagacgaataggtcaagctcttgtctgagcgctacgttcaaagaacggataccgccgccgacaggtgtcgttaacgggcctttaatcgcgatgaaatattcgcggatcacatctaatgtttcagcagggagccactcacctgttttattataagccttttctccggcgtaaacttctttccatgtaattttcttttcgcctttgtatgctttttctactgctgcttccaaaaccttcgaagccgcgttccaaatatcaggaccggttccgtctccttcgataaatgggataatcgggttgtttggtacgtttaatactccgttagagactgtaattttttcaccttgtgccacaataaaaacctcccagtatgtaattcatatttagaaaacattttatttttcttatatagaaaataaaatgatttttcctaacattcaatttaaagtgtaacccaattttgatgttctgaacaagaggctaacctcattgacgcaagccagcctccaatggttctttaggctctttcttcaatcggaacgaatttttgtttgtcagggcctgtgtaatctgcccgcgggcggatcagacggttgttgtcatactgctcaagaatatgagcgagccagccggacattctgcttacagcaaaaatcggtgtaaacaaatcatggtcaataccgaggctgtgatatacagaagccgaatagaaatcaacgttaggcggaagctttttctctgatgtgacgatgtcttctatacgaatcgacatctcataccatttgctttcgcctgtcaggttggtcaggcgcttgctcatttctttcagatgcttcgcgcgcggatcaccatgcttatacacacggtggccgaatcccatgattttttctttcttttcaagtttagcgcggatgtacggctcagcgttttccacttcaccgatttctgtcagcattttcataacgccttcattcgctccgccgtgaagaggccctttcagcgcgccgattgctgcagtaatgcctgaatagatgtcagaaagtgttgcgacgcagaccctcgctgtgaacgttgacgcgttcagctcatggtcagcatgtaaaatcaatgctttgttgaaggcttcaacttcaattggtgaaggctcttcaccgtttaatgtgtaaagaaaattctccgcaataccgtaatcttctctcggttcaacaggctcaagacccttgcgaattctggaaaacgctgcaaccaggccaggcacctttgcctgaaggcggatcgcctttctgtagttggcttccgggttcatggtatcagcctcgctgtcaagcaggcctagtaatgaaattgctgtccgaagagcagccatgggatgaacattttcgagggaataagatttgaagtgctcaataatttcttgcggaacggcagcttcctttgcaagctgctgctttaactcttcaagctcttttttgtttggcagccttagatgccaaagcaagtagatgatttcttcaaaacttgcattctctgtcaaatcatcgatatcataccccacatatgtaagggtatcatcaataatagaactaacagatgatgttgttgctacaaccccttcaagaccgcgtgtcgctgtcatatataacatctccttttcaataaatttcccctttaagagtgttgtaaaaacatgaggcttacttaaaaagcacgatgcaagtatttctctcccccaaaaagaaaatgcttacattttactggctgctggaactaaaaccctttgcttatgaaagaacataacaaattcttataagcttatttaagtttaagcctattctcattataaacaataatcagacatttgttaaatgtttacctataattttttttttcattctgtgatttccccgaaaaaacgcctttatttgcgggtttttgcataaaaaaaaagcggctttaaggccgcttttttttatgaagtgaacagttttacgatctgcatggctaaataagcaatccccgctccgatcagcggccccaccgcaactcctccaaaaagcgcgactgcaagaatggtcccgatcacgagagcagttgtaatatgcggatcattttcaagcagggccaggccgttttttgcaatcagcgccactgcgatccccgctccaagggcgatccatgcgtaggaagaccgcattgcttctccaagctgcttaaatccgatttctcccgtggcaatcgggacaagaacggcgatggtaataatggtcacaccccagttaatgccttttgactggatggtcggaaataatttctgatcaagcccaacgattttgatgatcaaaaggacggatacagcaaagagcaatgattggttttttgcgataagtgcgatagccaagagtaaaattaaaaataaattcgcttgtgtaaacacatgccatccctcctttaagatgaatgtattcatattcagccgcagcgtgaatacatataaaaaataggacatgctgacgagaggaggaccgttttcgtgaatcaatcttatatcactatttttttcagaaccctctttgtcatatcaatgaccgcagggtcgatagctgcggcctattattcgtttccgttaacttatccgttcctgatcgcccttattctttcttcagtgattcatcctgttgtcgattatttggacaaagtgacaggattcccccgaacgataaatgttctgggcgttcttgctttttttctgctcgcagccttcggcgtcctcaccattctggtagccgaaatcgtaacgggaacagcctatctagcaaaaacgctgcctccgcatatcagcacgtttatttcatattgcgaaaaattgtttaccactcatattcagccgctctataacgagttaactcttttgtttcaagaattggaaacgaaccagcaggcttccatcgtcactcatatccagacactcggtgattctgccgctaaaaatgccgggctcctgctgtcccacattctagagatgatcccgagatttttcgctcttcttcccaatacggcggcggttctgattttttctcttctggcaaccttttttatgacaaaggattggcataagctgaaagccatgcttgttttaattctgccggatcgtgtgacagctaacagcaaagcaatcagcagcgaattaaaaaaagcaatgactggttttatcaaagcacaagccgtcctcgttttcatcacgatggtgattgtatttatcggcctttctctcttaaaggttgaacacgccgcaacaattgcttttttaatcgggcttgtagatcttctcccttacttaggtgccggctccgtatttgtgccctggattttgtatttatcgattacgggccagctgccccaagcaatcggaattggtatcctgtacctcgtcgttcttattcagcggcagctgacagagcccaagatactaagtaaatctatcgggatcgatccgctggcaacactcatcgccctgtttgccggctttaaattattcgggtttttaggactgattgcgggaccggctgtactcgtcatcatccaagctttcatcacaacaggcgcattaaaagaaatatggtcctatatcaccgttcagcaaaaataaaacggcagccgttttttcatggctgccgttttttatttgatgatgatccgcttattcttcgacattcctctcagccatttgaacagaatcggcttacaccagccgcgggtaaacgggataagaagacaggcgccggccaaatctgataaaaagcccggaagcatcagcaatagaccgccaatgaaaatgcacagaccgtcagcaatcgcttctcccggcattttgccatattgaagatcacgctgaaccttataatacacttcggttccttgtttttttgcagctgctgcgccgataatgccagtcagaatcatgaatagaactgtcggcaaaataccaatcagctttcctaaaaataggaatataccgatttctattgccggaaacacaataaaaagcaaaaacaaaaatctcatatccaagccccccacacgtgtaacacgttctgttcaacaaaaggcatgataaagagaaaaggaagggattccccttccattttcacctgtaattaaagaacgctcgcacggccttgatagactgcgcctctggaagcgtcaactgtaatatcctggccatctgtcaaaatagatgtcgcattttccagacccacgataaccgggatgccaaggcttaatccgactaccgcagcatggctagtcaaaccgccttcttctgtaataagagcagacgctttttcaagggatgcaatcatatcacggtcagtgcttttggtaacaagtaccgcaccgtcagtcattttttgctcagcttcttttgcattttgtgcaacgacaaccggaccgtaagctgatttgcgtccaatgccttggcctttagcgatgatatcgccgacagtatgaaccttcattaagttcgtagtgccggactcaccgacagtgccagctgtaataacgataagatcgccgtgttttacaattccgctgttcaatgatttttggacagcatcctcaagcatctcatctgttgagctcgcattttggccgctttccgcgaatacgccagatacgagggcaagctttctggaaatagagtcatttacagtaaccgcaacaatcggagcctgcggacggtattttgcaatcatacgtgctgtatggccgctttctgtcggcgttacgatcgcagcagcattcaggttaatcgcagtatgtgcgacagattgtccaattgcgtctgtaattgtcatgcccacttggtctctgcgttttgagagaatttctttataatttaatgcttcttcagaacgggacgcgatgttatgcattgtttgaactgcttcaaccgggtaacttccggcagcagtttcaccagaaagcatgatcgcatctgttccgtcgaagatcgcgtttgcaacgtcacttgcttccgcacgagtcggacgcgggttgcgctgcatgctgtcaagcatttgtgtcgctgtaataacaggtttgcccagcgcgttgcattttttgatcagttctttttgcacaagcggcacttcttcagctggaatttccacacctaagtctccgcgcgcaaccattaagccgtcagacacttcgagaatcgcatcgatgttgtcaacgccctcttggttttcgattttagggatgatttgaatatcctgagcgttgtgctcttcaagaagctcacggatttcgagcacatccgtagaacgtcgaatgaaagatggtgcgatgaagtctactccttgctcaataccgaaaacgatgtctcgcgcatccttttcagtaatacccggaagattgacacttacgcccggtacgttaacaccttttttatttttgagtgttccgttgtttaatacttttgttttgatttcgcgtttagcggcatctacatcaagtacctcaagaccgataaggccgtcatctaacagaatcgttgaaccttgttcaacgtcatggactaaaccttcatatgtcactgaaattttatctgttgttcctacaacctcgtccattgaaataatgagctctttgcctgtttcaagctcaataccgccgttttccattgtatgtgtgcggatttcaggaccttttgtatcaagcagaattccaacgttcttgccaagttttttacttgcttcgcggatatttttaattcttgcaccgtgctcctcaaaatctccgtgagaaaagtttaatcgagccacgttcattcctgactccattaatttcgtaagcatttcaatactttcacttgccggaccgatggtacaaacaattttagtttttctcatttggttcacttccttctgaaatcttcagccttcatctgcacattagatagacagttcttttgaaagctgatacatgttttgctcaactgtgtgttttgtctcaagtatttctataatatcatggtctacaagcttattgttttgtatacctacacagcgtccgccttttccttcaagcagcagttcaactgcatatgcgccgagacggcttgccaacacacggtcagcagcactcggagaacctccgcgctggatatggcccaatacagataccctagtttcaagatttgtttcttcttcaatgcgtttcccgaattcaacaccgctgcctacaccttcggcaacaataataatactgtgcttcttgccgcgttcgtggccgcgttttaagcgggcaatgatttcgtgcatgtcatagtctgcctcagggattaagatcgattccgcgccccctgcaagaccggcccacaatgcgatatcgccggcatgacggcccattacttcgattacatatgtacgttcatgagaagtcgctgtatcgcgaatcttatcaattgcgtcaattactgtatttaaagctgtatcgaaaccgattgtaaaatcagtgcccggaatgtcattatcaattgtacccggtacacctacacatggaaacccgtgttccgttaattttttcgcacccatataggaaccgtctccgccgataacaacaaggccttcaataccaagcttcttcaagtttgctatccctttttcacggccttcaactgttttgaattcaggacatctcgccgtataaagcttagtccctccacgatgtataatatcgcctactgatccgagttcaagcttttcaatctttccgctgatcaatcccgcgtatccgttgtaaataccgtaaacttcaacgtcatgatagatcgcttttctgactactgcgcgaactgctgcgttcattcccggggaatccccgccgctcgttaatacccctatacgtttcattctccattcacctcagcaacatatatgattaaacataacatgatcattgccctaaaaacaatgaaaagggatctccatcctccctatgaaaccttacctattatacaattaaataaattgtttttaaataaaatttaaggaatgtcacaaaaaataaacgtgagccaaaggcttcacgtttatttagtttaccccgatatattgatcttcaaccgagactttgccaattgctttatatttttcatagcgctgctgaactaattcttcttcgctcagcttcagcaaagtttttaacgattgtttaagggtttcgtccatatagcttgcctgcagcttcacatcatggtgcgctccgccttttacttctttaatcatatgatctataatacctaattcttttaaatccggcgcagtgattttcattgtttctgctgcttttttagcaagactggagtccttccataaaagtgccgcggcaccttccggagaaataacagaataagtagagttttccagcatatgcaaatgattgcctacacccagaccaagggctccgccgcttccgccttcaccgatgacgatacagataacaggcactcgaaggccggccatctcaaacaggtttttggcaatagcttcactttgtcctctttcttcagctgctcgtccagggtatgcccccttcgtatcaataaaacagataattggtctgttaaatttgtcagcctgtttcatcagacgaagcgcttttctgtagccttcaggatgcggcatcccaaaattgcggactaggttttccttcgtgtctttgccgcgctgatgcccgattaccgttacagggaggccgtggaacttcgcaatcccgccgacaatggcttcatcgtccccgtacgctctgtctccgtgacattcaaaaaagtcggtaaacaggtgttcgatataatcaagagttgtcggacggtccgccagacgcgcgatttgaacccggtcccatggcttcagatttttgtaaatatcatcctgaagcttagcgagacggtcttcgagccgttcgatttccgcacttagatccatatcggaatcttgggtgaatttttttagttcggcgattttggtttgcagttcaatcaccggtttttcaaattctaatcttggagccactcaatgtcacctcctgtttgatgcatatccagcagattttctaacgtttttttcatatcgtcacgatgaataaccgcatcaagctgtccatgttttaataaaaattcagccgtttggaagtcctcaggcagtttttctcctattgtctgttcaataatccgtcttccggcaaaaccgatcagcgcgccaggctcagcgaaattgtaatcgccaagggatgcaaagcttgctgatacgcccccggtagtcggatgcgtcattactgaaataataagaccctgttcttcactgaacagttttaacgcagagcttgtcttagccatctgcatcaaacttaatacgccttcctgcattctagcgccgcctgaagccgtaaaaataataaacggaactttatcagcttttgctttttcaatcgcaagcgtgattttttcaccgacgactgaacccatgctgcccattctgaatgaagagtccatgacggcgactacagccgggtgtccgccgatggtgcccttgcctgtcacaacagcctcgtttaaggatgttttctcgcgatctttttcaagcttttccagatatcccgggaaaccaagcggattttccgagagcattccctgattgaattcctcaaaggatttttcatccatcaagctttcgatacgctgttttgcgttcattgggaaatgataatcgcagttcatgcatacccgcatatttttatccaactctttagtgagcatgatttttttacacttaggacattttgtcataatgccttccggaacatcgtgcttcgcttgatcagatggtacggaagcatactttttctttttcgtgaatatatcctttaacaaatgattacctcccttttgtgaagggttctcttcaccgcatgtcatcaaacagatagacttgctaataactttaccgaaactattgtactttttttgtcaaacgctgtcatcctcaattcgacaactttttattcgatgacgtgctcggaaaggcttgtatgaaatcagataaggtgttgaaacgacaaggttgacagcgcattcaaaaataatgttaaacccggctgaaatttttttaaggctaaccccctaaaaaaatttcagccgtcagtttaacttgagaacagcgcgccggtctccgccaacgcgctgccatttttggaatgaattaaaattattcaccaataatcgtaagttttcttgttttttctgcgacttcctcagggtcaacagtgattcttgcaacacctgtttccatcgcagcttttgccacagccttcgcaacagcaggcgcaacacgtttatcaaacggtgcagggatgacataatctgcgctaagctcatcttctgaaaccagtgaagcaatggcttcaaccgctgcgattttcatttcctcgttaatatgagtggcacgcacatcaagtgctccgcggaaaataccagggaatgcaagaacattgtttacttggttcgggaagtcagaacggccagttccgataacgcttgctccggcttcacgcgcatcttccggcatgatttccggatttggatttgccattgcaaagataatcggatcttttgccatgctttgaaccatttcttttgttaacgcgcctgctacagagacaccgataaatacgtcagcatcaacgatgacatctttcagagaaccgtctttgcgatcttggttcgtgaacttcgccacttcatttttgacatcgttcatgccgttcgggcgcccttcataaatggcccctttggaatcgcacatcacaatgtcgcgaacgccataatgatgaagaagcttgataatcgcaatgccagccgcacccgcgccgtttgcgacaactttaatggatgacatggattttccagacagtttcagcgcgttcacaagacctgctacggttacaatggcagtaccgtgctgatcatcatggaaaaccgggatgtttgtttcttttttgaggcgctcttcaatgataaagcagtttggcgctgcaatatcttcaaggttgacgccgccaaatgtcggttccagcaattttacagtttcaacgattttatcaacatcgtttgtgtttaaagcaatcgggaacgcatctacgcccgcaaagcttttgaaaagaactgctttcccttccataacaggaagcgccgcttcagggccgatgtttccaaggccaagcacagctgtaccgtcagttacaactgctaccatgttccccttcattgtataatcatatactttgttaatgtcttcatgaatatccttacacggttctgcaacacccggagaatacgcgaggcttaaatctttcgcatttctgacctctacttttgatttagactccagtttcccctggttgactttatgcaggtgtaatgcttcttctcttaatgacattctcctaaacactccttatggatattttttgattcgtatactgctgcgttgattgctgcattctgcggagtaaatctatctgaatatttaaacaggatcacataattgctccaattgtataacaaaaagcgaatcgttaccactgttttaaaacgacgtttttttgacccaacagctcttttaagcgatataacacctggtgatctgcattgatatggaacgactcaggtagcttaatcgtctgtttttgcctttcataatagagataaacgcctgtttcccctttatgctccagcaaaatgcgcttaatctttgccaggatctcctggctgtgctgactgctttctatttttatataaaccgatggcgctttttctgcatccatatcttctaataattctgcccgggacatgatgaattggatcttatcttgtctaacttcacatttccccgcagtgaacaaaagagcgccttctcttaaaacgggagaaagctgtctgaattgttcagggaagactacggcttctatctcgccggtttcatcactgagcgttaaaaacgccatgttttgacctgttttcgtccgaatcgttttgatcttcgacagcagaacgcctagtgaaagctgccttttgactgcccgctgagcctgcagaatagagactgctccttgcgcagtgagctgttttcggaaggcggagaggggatgatttgaaaaataaatgccaagcgtttccttttcaaacgcaagtaaatccaccagaggaagctcctccgtctccacatacttcggcttaattgaaaacgattcatctaaaaacaatcccatttggtcatcgtccgcggcgaatagctcagcatgttccaaagcaacatcaatggatgcgagcagcgtggcccggttttggccgaattcgtccatcgcaccagaaaagataagtgcttcaagcattttgcgatttacgctttttgacggcacgcgaaagcagaaatcgaaaagatcttcaaatggtttctcttttcttgctttatatatatctttgactgctgagacgcctacactttttatcgcgcggaggctgtatctgacagatccgttttcaactgtaaacggaaaactgcttttattcactgacggaggaaggatacgaatcccgctcccctttgcttcgtaaagatattgagagattttatcctcattgccaatgacgcttgtcagcaatccgcacataaaatataacggataatgagctttcaaatacgcaagctggcacccgatcatgctgtatgccaccgcatggcttctgttaaagccatagtttgcgaatttgacgattaaatcgtagacctcatttgcagtgtctacagaatactccttttttaagcacccttcaacaaaatggcttcgctctctgtccaggatttcttttttctttttgctgaccgcccttctcaataggtccgcttcgcctaaagaaaaccccgccatacgggaagcaatcatcataatttgttcctgatacacaatgacgccatatgtatcttccaaaatgctccttaaatcttcatgaggatagtgaacaggcgcccggccgtgtttacggtcgataaataacggaatattttccatcggacccggccggtacagtgcattgaccgccacaatatcttctaggcccgaaggtttcagccgtttcaagacgcttctcatccctgcagattcaagctggaaaatgcctgtcgtatccccttttgacagcaaggagaacgttttgtcatcgctgtaggaaatacttgaaaggtctattttaatattttcttctttttcaatcattgaagtgatggattcaataagtgtcagattcctcaaacctaagaaatccatttttaaaaggcccaagtcttcaagatggtccatcgcgtattgcgttaaatagatcccttcatgcccttcttgaagcggaacaacatctgttaacggttcttcactcaggacaacgcccgctgcgtgggttgatgcatgccttggcagcccttctattttccgggcaattgaatagacttgctgaagcaggcttgactcccgaagccgcttatccagctgcggtgactgctgtctcgcttcatccagcgtcattcccggtcttgaaggaatgagttttgcaagctgatctgcctccttcgggctgacgccgaatactctgccgacgtcccggagcgccgcctttgccgcaagtgttccaaaggtgataatctgtgcgacgtgcattgcaccgtatttctgctgaacatattgaatgacttcatcccttctagtatcgggaaagtcaatatcaatatccggcatgctgacgcgttcgggatttaaaaatctttcaaacagaaggtgatgcttaatcgggtcaacatctgtgatatacagcacgtatgccacaagagaacccgccgcagaaccccttcccggtcctgtaacaatccctttttcatgggcgtgcttcataaaatcccacacgatcagaaagtaatcgctgaacttcatccgcttgatgacatcaagctcatattgaagacggcgaaggtatcgttcatcaggcttgccgaaacggctgcggagtccctccatacagatatccgttaaataatcatcagcggacgttccgtctggggtcggaaaagacggtagacgggtctgcccgagactgacgtcaatgcggcattgttccgcgatctctacagaagcttgcagtgcctcgggatgctctcgataaatgttttgcatttcttcgtgtggtttcaaatcgagatcaggcaaatcttcagcgggtgcatccgtcagtttttcccccgctttaatcgctttcaaacaacggtaggcagccttatcttccttccttatgtaatgcacatcgcctgtggccgtaacagggatacccgtttcttctgacagctttagaatctgctcagacaagacttgattccctttaaaaggctgataggagaaataaaaagctccctttccgaatatagactgaaattccagcgaggcttgagcagcctgttcgaacagtcctccttcaagaagcgtttcaatatatcctttttcgccgggcgttattgcgataatcccttctcgataactgtgaagccatttcggcttcagtccgccttttgatttagattgcagaacgctgctgattttcagcaggttttgatagcctgtatttgattttgccagcaggacgagcgggtatgcttcaagttcgctgtcatctgtaaaaacagaagccgtcaaaccgattattgggttgatccctctcgtcttgcaagctttgtaaaattgaatagctccgtacatgacatgatcatctgtcagcgccaaagacgcatatccgagcctgtcagcttcactgacgagctcttccacagccgcggcgctgtttagcaggctatacccgctatgcacttgcaggtgaacaaaagacatgctatcacctctttctcattacgattcatttcttccctcattataaggccggtttccaaaagaaacaaatgttcttttttgactcatcatcatacttgtcctgaaagctcaatatgatataaaaggtgaggtgataaagatggatcaggaagcaggatttatggtgaattttatcaatagctacttcattgcgttaggggtgctgatcgggggcgcactcattggagggctcggagcatatttggcaggcgaacccccgcttacagccattacaaagcttgccaaccggttaaaaatatgggcgcttgtcgcagctatcggaggcacctttgatgcggtatacagctttgaacgcggcatactcgaaggcaatacgagagatatctttaaacagcttcttttaattatttcggccatggggggcgcgcaaagcggctggcttattatatcatggctgacccaggagcatctttcttcatgagggtcccccagcattacaaaaaaccgggatggcagcgttttttcgcgggaatgatgtgcggagccgtaatcagctggttctttttcctgtttacttacggaacattccaagaggagcaggtcagcctcatcgaaaagcaaaaagagcatgtaaaagacttgaacaatcaaatttcgatctatcaggaagacctccataaactgaatgaagataataaaagaaaactgctgattcaaagcgtcagcgtcaaattgctgaatggggataaatataaaatatcacagccggataaaacgaaattcgaggagcatgtaaaggatgatatttcagaggtgattacaaaagacatagagagcgtctatcaaacaaaggatctcttgaagcggacaattgaaaataaagtctatatgatcaatgaaaaaaaatacgaggcaaccgtcagagaattgattatttatacgaggctgacagtggaacttgaaatatctttcgccacataattatggatttttttcaaattctccaaacttctgtcgctttttcccattcttttttataaactatatgtgaggcttaatggcgaaaggaaggaggaagggaaatggaggtttacagtgaccgtcagttagcaaaagatcaagcagcccgtctcagacaaggtttttctgcatatgccgaaacaaactcactcgcttccctcatcaaaaaagaacttcaatcacacaatctccaagtctacgaggaccttactgatttcggctgctggttcatccccgtcacagatgaacactaagagagagggtctcccctctactcgtgttctttacataatgtttccagatcagctaaaatccgatcagcttcatcccagctgtaaatagaggcgcctgaagctaacggatgccctccgccgttatatttccgggcaagtccgttaatgacaggccccttcgaacggaatctgactctgatttgatcgtcttcttctacgaaaaacacccaggcgcgaatacctgagatattgccaagcgtcccgacaagctgtgacgcttcagaagccgttgtgccgaatttttcaagcgtatcctttttgatgaaaacagaagcggccccgttttcggacaaagacacattttgaaagataaagccgttaagcttcaccacattcagttttgtttcatacaattgattaaacaactctgaggaagagaatggatactgaatgagctcgcctgcatattttaatgttttttccgtggtattcggaaataaaaagcgtccggtatctccaacaatgccggcgtagatcagctctgccgctttcgtattcagcttccagccgtgctcttttccttctaaatacagctcgtaaatcatttcacttactgagctggcgcttgtatcgacccagagaaggtcaccgtatggatcttcgttcggatggtggtcgattttcattagtttggcgcctgaaggataacgctgatcgtctattctttcctgatttgccgtatcgcagacaatgacaagtgcgccttcatatgtttcattgtccacctcatcaagggaatataagaaagagagggacggttcaggcgtgccgaccgcaaaaatatttttttcaggatatgtttcacgcaggatttccgtaagcccgcactgtgatccgtaggcatccggatcaggacgcacatgtctatgtaagataatcgtgtcatataatgatatggttctgatcaattctgttttcatttgatactcctttattgtttttattcattaaatcacattctctgccgacggaaaagaaaaataacgtcaaaaccaagcccgtttttgtataaaatgggtttgtaaacttttacgatggaggatttcatttatgctggttcttgtttttttgattgggctttccgcctgcttttatgtgtactataaagtaaaaggcgtacgggcaaagccatctttggcaaaagaaatatgttcagcaaaatcaagcatggccttagggtcactagtcctgttctacgggctcaaccaaatgatattattccattcagtattaacgttaataatcggcggtatctttatcgtcataggagcaggaagcgcttgggcaggttataaagcctttaggcattacaatccccttcacgccaaagaagctgaaagagatcacgcgtaaggggcgcctgaacgtcccttagcttctttccatcagctgaaccatcagcatcgctttagacacgatatgaccttggctgtgcacttccacttccattttcccgaactttctgccagcctccaagatgcgaggtttgacttcgatgactgattccatctgcacaggcttcaaaaagaagatggtgatgctctctatgacgagttcgccgcgttttttcgagcgcaaaaatcggtttgccgcttgcgtcaaaatggtcgtaaatacgccataagaaatggttccaagctgatttgtcatttgcggcgtgacttcatactcgtaaaccgtttgatcttctttatcatcaccctcatctttaaacccccttgaaacgatatcatcaagcttctccccgacctgcggctgcttttgaatcatttgaagagctttcaatacgtcttggcggctgatcatgccgatgagtttttggtggccgtcagtgacgggaagcacttcgatcccttcccataccatcatttgcgcagctgaagcgacagatgttttcccaataaccgtgacgggatttttggtcataactttttctatagatgcatttcggtcatggccagcaatatcttttgatgtcagaatgccatggattttcatttgatcgtcgacaaccgggaagcggccgtgccccgtttcaaaatttttctcataccatttttcaagtttatccttaggcgaaagatataccgtgcggtcagcaggtgttaggatgtcctccaccaaaacaatttcttttttgatcagctggtcatatattgcccggttaatcatcgcggcaactgtaaaggtgtcatagctcgtggataaaatcggcagttcaagctcatctgccagctgcacaatgctgtcatccgtgttaaagcccccggtcaccaatacggccgcgcccgcttcaagcgcctgcctgtgtgcattgattctgtttccgacaatcaaaagattccccgctgcggtgtaacgcatcatcgcgtcaagctccatcgcgccgatgacgaatttattcaatgtcttatggagccctgccctgcctccgagcacttgtccgtctataacatttacaacctctgcataggtaagcttttcaatgttctcttttttcttttgttcaattctgattgtgcccacacgttcaatcgtgctgacaaaccctttattctctgcttccttgatcgctctgtacgcggttccttcgcttactttcatttcctttgcaattcttcggacagaaattttttcaccgacaggcagtgaatcgatatacgttaaaatttgttcatgcttcgttgccaagcctttcacctctaaggacagtcttcttgtttttattataaggtttcaaaggatttatacgcaatgaggctggaaaataaaaaagaagcccgaccggcttcttacagcgttgatttcgtcccagtcaagcgcaaggaccccgtggctccttttacatcgtaaagcggaaaaacctttatttttcttttaaatggacatcaaccgctgtcttaacaatatttcgattccctattttagataaaacaaataaaactgcaaatagccatatcgcccctatggccgtatagatcaatggataaacagctttgtttgcgatccattcatttattaatgttctggcatttaccagaataataaatcctcctacaagcacacccatcaattgcggatgaaacttctgcaccagccatgctgcgataggggcagcgataattccgccggccattagtgaaaacacccataaccaattgacgtcctcccatcctaatgaaataagaaaaccggcggttgcagatacggcgatggcaaattcacttgtgtctacagtcccgacaactttcctcgggctcaagcctttgcgggataataaaatcggagtggtcaccggtccccagccgcctccgcctgtggcatctgcaaaaccagcgatcactcccaatgggatggattgttttcggtttaacggcacatgcttcttctcaagagccggcttatattgaaataaaaacctgatcaatacatatccgcccagaaggagcaaaaacaaagaaatatagggtttcgccacatctccaggtaattggctgaggaatgccgcgcctaaaaaagcgcctatagagccgggaatgacaagctgataaacggtttgtttgtcaacattgccaaatttaatatgcgacactcccgatgcggcagtcgttacgacttccgctaaatggacagaagccgaagccacagcaggtgtgatgccaaacgccaataacaaagaagttgaggtaaccccataagccatacctaacgaaccgtctattaactgcgacaataaaccaataaatgcaaaaacgattaatttcttcatcagaacaccccatctatatcaatcagatatttttgactcttcattcgaatctaacaatctcttggcgctttcatataaaaaataagaggctttgataatggcagtttcatcaattgtaaatgcagggtggtgccaatcatgatcaccgtctgttccaaaaaacgcaaaggatcccggaatatgctcaagataataagcaaaatcttcccccgcggttgatgggtcgggatcaatgacttgaagtttcgctttatgcgcagcgtctcgcaccagccccgtaattgcctcatcattacaaagcggcggcggtccggaatgccacttcacatttgcctttaacgagaatgcggcagaaatctgctctgcgactgccaaaaaacgctgtttcacttgatcacgaacctctgaatcaaatgtacgaacagtgccctcaatgacaactgtatccggaatgacattccaagtgctgccgccgttgattttccctacggttaaaatcgcgctttgcagcgggtttacatttctgcttacaatcgtttgcagggcgacaataagctgagaggcgccgacaattggatcaaaaccattatgcggcaatgctgcatgagcacctttcccttctatctttactttaaatcggtcaacagcagccataagcgggcctgtttttaaccctacagtcccaaccgcgatatccggtttattgtgaagtccaataaccgcatcaatgccatccagttggccgtcctctatcacttttgcagcgcctgcacccgcttcctctgccggctgaaataataaacgaacctttcctttcagactgtcttgattttccttcaataaaaagaccgcaccaagaagcgctgccgtatgaaaatcatgaccgcacgcatgcatgatccctttatgtttagacgcataaggcaatcctgttttttcttcaattggcaaggcgtcaatatcagccctcaaagcaatcgccggaccttctgactcccctgctatgtctgcgaacacacccgtttttagagcagtagggcgaatctgtatccccttttctttaaggcatttttttataaaagcagttgtttcaaattcttcttttgacagttcaggatattggtgcaggtgccggcgaatgccgatgagctgcttttctagcgttgagagatttacgggattatactcccctttcaacttcaggatgtcatttcctgtagtctgatatggataggagccttctatatttctccaataatccaaagacatatgtaccgctcctttccctatcccaatatattttcttcagactcttcaacataagatgaaataaatcggttcaatttatcagcaagaccgcccgccccaaatcttatatacttgctggaaactttcggattatcttctttcaaaaaacttaaaaaagataaaatataaatgcgcctgtaagctacttgtgtaattccgtactcaaaaaaccagttatcaatgacattgtatacgcctcggttgacgccatataggttgttacatttcttgtaaaagcagagatccggaagatttaactcctgatgggaaagcaggctttcttttttgttcggtgccataatcccaatcagttcaaagcgttttgcaacgcaccaaatatcctttttaatttgctttgttaaagactccaaagaatcaaaccttctttcttctctaattttaaagagaatgctgcattcgattttttctccatagatgtctctatgaaagtcaaacaaaaaaatctccaatgtccttttaaggttagagcccaccgtcggtttcacaccgatattcataacccctaaatggaattggtgattgactgtcgccagaactccataaactccattacgcagcccatgcatttttgcatctacatttgccgtggggaatccaagctttctgcctaattgttttcctttcacaaccgtaccggcaatgatcgtcaaaaaagtcagcctcctctctcagcttccgcattcgatcagacgaaacctaatgatgtgatgaatgtaaaacggattgatgctgcggaatgccaagaccgagattttcccgcaatgtcccgccgcgataatcttgacgataaagccctctttcttgaagaatcggaatcaccttttctacaaaagcatcaagtgttcccggtatatccgacccaatgataaacccatccgccgcctcagcgttgaaccaagtttcaattaaggatgcgacacgctctggtgttccgatgaatagagtccgtggaaaagccatttcctgtgctacctcccgcaatgtcagatttctggcttttgcttctctcttaatccggtctgttgtgctttgaaacgcattctttcccacatcgccaatatcgggaaatggctcatccaacgggtaaacactcagatcataatcatcaaaaaaacgagccaaataagtaacagcattttcaatcggtatcaattctgcaaattcacgatacttcttttccgcctcttcttccgtatctgccacaatcgggctgatccctggaaaaatccgcacacttgaaggatcacgcccttcatcagcagctcgccttttcacatccgcataaaacgcttttgtctcttctaatgaattggaatgggtaaaaatcgcatccgcatttttggcggcaaactgccggcctgtttctgatgaacccgcttgaaacactacaggctctccctgtttagagcgcccgatattcaagggcccctctacttgaaaatactttcctttgtgattcaggcgatgaagcttctccggttcaaaaaattgccctgttttcttattgtgtataaatgcgtcatgctcccaggaattccacagcccgcgcacaacatccaaatgctcctgcgcgatttcgtaacgctcagtgtgttcaggcagattggacttactatgattgcgcgccgccccttcctgcggcgaagtaaccagattccagccggccctgcccccgctgatatggtccagcgacattaattgtctggaaatagtgaatggctcagtaaaagatgtagagaacgtccctactaaaccaatatttttggtaaccgatgccagcgcagataaaatggtgatcggttcaaaacggtttaaaaaatgaggaatcgatttttcagaaataaataagccgtctgcaatgaaaataaaactaaacaaacctttttcagctgtttgcgcctttttcatgtaaaattcaatattcgtgctggccgagggatcaacatcgggatgacgccagccgtcagttgttcccccgacaccgtgaatcatggctccaaactgaataaaatctgaacgtgtcatctttttgcctcctttatctgtgcatgattagcaagtgcaagatcaaggtgttcaatgccgatttcagttatcccttgatagtgattgccgcgcccgatttcgaccacaggcacatggcgtaccccatatttcgcctgtaaaatatctcgaagttcctctttctctgaaacatcgatattttggaacgggaaccctttttcattcaaataattcttgacttcctcacaatacgaacagccttttttactccaaaccacaatgttcaaaacatcactcattcttctgaacctccttaacgttttgcagctaaaactgcatcgctcagcagctgataagacagctgtttttcttcagtatttttgatcggtgtaaaaataacaaaatcattgattttgtatgtgcctgataaacgtgttaattcttctgccacttcttcctttgttccggcaataatcccggttttttgcacgatgatgtcatagggctctgtgacgttttccagataggcctcagcctgttcgcgggaaccgacgttgaccttacgcccgtctttcaaatccacttttatcgattcacgcgacacaatatgtttttccgcttcttcttttgtatgtgccgcaaaaacagcgggggcaagatgaaattcagcctcagatcctggcgggagatgcgcgtcaaatgctcggcgggcttccttcagcacttcctcttcaccgttaataaagtaagcaaagacaaaagagattcccagttttgcagccgaaatggcactctctgcgcttcctcccaatagaaaaatacccggcttctgatcaacctgcggcctaggacgcaatgcggcatagcggtgggtatcaggaaaatcatcccgaacgaaatgagtaagctcctccagtttttcatcaaactgacgcaccggttttttatattcggcctgcagcgcgtctgtggacagctgaaacccgccgggcgctttgcccactccaagatctatacggccgggagctaacgctgatagaagatggaattgctccgctactttataagagctgtaatgctgcagcatcactccgcctgatgctaaacgaatttttcttgtgcttgcagcaagatagcctaaaagaacctcgggtgcagaccctgcaatctcatcattgttgtgatgttcggccacccaaaatcggtgatatccacactcttcagccatttgtgccaagttcactgtatgctgtaatgtatcagctgctgtctccccttcaccaatcaagctttggtctaaaatacttaagcggatcatatcaccggctcctttatgtgttcttttggttcaaataaatattccggcgaaacacggcggagaaactgcctcgttctgtcttttttggtatggcgaaagacttcctccggggttccttgttcaacaatgactccttcatccataaaaacaacttgatcagagactcttcttgcaaactccatttcatgtgtaacaacaatcatggtggctccggttttcacgatttccagcattacctcaagcacttcaccgaccagctccggatcaagcgctgccgtgggctcatcgaacagcagcacatcaggatgaatggcaagcgcccttgctatccctaccctctgcttttgtcctcccgataactgactcggataagcgttcaatttatcttgaagcccgacctttctcagttcattttccgctacggcatacgcgtcttgttttctcattttccgggcaatcgtcaagccctccatgacattttcaatcaccgttttgtgagcaaacaggtggtattgctgaaataccattgccgtctgttttctgagccagtgaacctcttttttggacggaaagctgcaattaatcactttgtcatgtatagaaatgatcccttcgtctggacgttctaataaattcaggcaccgtaaaaaggtggttttccctgatccgctcggcccgataatcgtcacaacttctcccttgcgtaccgtgagatttatcccttttaatacatggtggatgccaaactgtttatggatatttttaatctcaatcataaagtgcctccttgaaatctggctgcctttctctctaatactccatttgcggattctaggattagagtcagcacccaatagataatcgctgctccgataaacgcttctaaaaatgcataattatcagaagcaacgatagtcgccgtccctgtaatctctgggacagccactatagccgcgatagaggtggtatgcaaaaagccgatacccaaatttgtgaagtttgggatggaaaccatcagcgcctgcggcaatattacacgccgaaaggtttggctgtgtgtcaagccgattgaataagccgcttcgacctgtccggtatccatcgccagaatgcctgaccggatgatttctgtgagataagctccggcagttaaagacaaggccatgatgacaaacatggagaccggtatctcattggcggaccagccgagatgaaaaaaactgctgacttgatctgcaacaggaggtatccctaaataaatcaacataatgtgaaggattgcaggtgtacttcgaaagaaagacacataaaaccttgagcaagccaccaagcccttaattctaaaaattctaacaattatatttccaagagccacgagaaatccaaacacaatcggcaaaacagccatcatcaatgtcagaggaatggtctttaccatttctttcatggcggaaacgataaatggaaagtcaaattgcaatcttctcccccctcatccgaagaaatatatcaatgtatgttcatgtcaaaaacagtaacaatccttgtttgattcttcttgattcgtttttctgccactcgaaagaaccattcgaataaaactgcaacagcataataaacaatcgatagcgcaatgtaaacttcaagagaatggttgcttgaggtaatcagtgtttggccccttccggacatatccataacacctattgaaaaagctagagatgtatcttttaaagaactgatcaccatgtttcccatattcggaaatgcctggacaagtgcctggggcagaacgattcgcctgaaggcctgactaccgcttaagccaatactgtacgccgcttccgtttggcctttatctacactgcccacccccgctcgaatgatttctgcggctgccgctgcattgcttaacgcgtaggttgcgacagcagcataaaacgggtccatttttgatgtatcaatcccgataagtcccgtaagcgccgggattccgtaaaacacgatgaaaagctgcaccatgataggcgttcccctgaaaaatgagatatacacttttgccaattgatttacaattggaatattgtagatgcggggcagtgccagaaagagtcctaatacaaaaccgaaaagcaaggacagtgttaaaatgtataatgtaaccggtaaataagcggttaacgtcggcacaaaatctccaatcatgttcatatcaaacgctttttccatcactgctccctctcttttcacctaatactgctctttggaatagtcgtcaccaagccattttaaactgagttttttcagcgttccgtcatcaatgatttcctgtaaggctttatcaatatcgtcacttaacgtttgttcatttttgttaaacataaaatacactttggcatttgaaagcacatgaccgacggttttttctttaatagcgctcgtcttgttttgaaagtctactgcaaaaggcgttgagatcgttgcgtccgcacgccccgatttcagctgattcgcagtctcatttgcgccttggccctcataggcaatctcaaacggccgtccattatcctcattccattttttcagtacaagcgctccgttggaggttgcactcgtaatcacccgttttccttttaagtcttcaattccacggatcgtatcgttattttgaagcacagtaatttttaaaggaaaatggttgtaagcaaccttgttaaacagaaattttttctcacgctctttgcttttctccatttgatgtgccacgatatcgactttatgctgtccgaggctgacaagcaggttggaaaattccatcgttttaaatgtgaatttataatgtggcaggcgcttatcaagctctttgatcagttcgacatcataaccggttaaatcgcctttttcatcaataaagcaaatattcggaaattgggttccagttccgaccgtgatcgtctgtaccttcttttgcccggctcccgtcgtttgactgcctgcaccgcaagctgacagaactgttataagcgaaaataatattgccatgaatgctgttttcgttttcatctcatcgccccatttatttttcaaaacttgattttgaataatctgccccgagccattttcggcttagtttttttagcgttccgtttttctccagctttttaatcgcttgatccgtgtcatccgccaaggtttggctgcctttattaaacataaagtacacctcggtatctaataacacgtcaccgactgtcttttggcggaaggcgtgcgttttattctgaaaatcgacggcaatcggtgtagctatcgttgcatctgcgcgcccggtttcaatttgattggcggtatcattgcttccctgtcccgcatatttcaaatgaattgggctgccgtgcgttttgttgtactttgtaatataatctgccgcatttgacgtggcgccaactatgactgtttttccgtgtaagtcttttaatgtatgaatcttgtgattatcctctttcaccgtgatgtacatcggcgagtagttatatgggactttatgatacaaaaaacgcttttctcgttctttatttttggccatattgtgcgcaatcacatcaatttttttatttccgagactcgtcagcaaatttgagaaatccatcgttttaaattcaaatgtatattgaggcaactccttatcgatggctttcatcacttcaatgtcatacccggtcaattcacctttttcatttaaaaacgcaatattcggaaaatctgttccagtgccgactatgaccgtttgagcctgacgatctgttttgttatttgtttgcgaacatcccccgccaagtaatgcaaacactgacagcagcaaaaccaatcctttacgcttattcataggctgcctcacatcatgcccagctgggcgcacctaaaagcgttgggttaaatcgttccggaatcagaaccttgtgcatcatcacacctatgtccccgtctttttcctgctcaaaatacacttcataccctctccttctgtacatgtcagcaagccaaggatgcttgcgcgccgatgtgccgagtgtcagcgcaggagccttcagcatatctcgaagcactttttcttcaacatacgtaagcagcttacttccggcgccttgccctttatattccggcagtgtcgcaaaccaccacacaaatggatattttgaaggaggcgtctcactctcccacgggaacctgattgtaatcgttgaaatcagcttcccatcccgctccagcacaatcgctgaatgatgttcaatattttctgataccatttggatatcagctctcgtggatggccaatcaatatccagctgccgaatgggctgaaatgcgctgttaaccagtttcaacagctccgatgcatcttcaacagttgccagtcgaaaaatatcatcactcatttttgtcactcctcttcacaatatatataattcctatttgtttactaatcttttattgtttatactataaagcatactctgatctttgactaatcaaaaaaagtaaaccttcacttcagtaattttaatgatgaaaaacaggagggagaacattggagttacgctcaatcaaaacgtttcatacgattgtaaaatttggaagcttctataaagctgcagaaatactcaactactcgcagccgacgatatcgatgcgtatgaagcaattggagcaggatttaggcgtactgctgtttgaaagaggaaaaagcctgcagctgacaaaagcagggaaacttttttatgaacgaacaggagatcttttgatgcaatacgaggcgcttaaacacaacctctccgacttaaaggaagaagaggcaggcattatcaacataggggtttcagagccaaccgccagtctgatattccccgagattttaaaggatttcttaaaggattacccaaagataacagttaatatcaaggttgatgacgccaatacctgcagtcaaaagctcttagacgggacgattgattttgcagtctgcggcgagccggagctgattcttgaaaattactaccatccatttttttatgacacattaaatgtgattgtatctgagcaacatccgctcgctgagaagaaggctgtccatttgtctgatttagcagaagagcgcttcatatttacgcccgccaattgccccattcgcttacaaattgaacagcatttacatagagaactcgggaatcgttacaaaaaaatggagctcacaagcagcatgtcacatgaatattacgtacgtgaaaacatcggaatttcaatctttaccagcaccgcacattctaaaccgttcaacggcactaaagtcattccaattctgaacctggatatcaccccgcccatagggctgttgacaaatcaaaaagaagttcattttgaccgcgccacgaaggacttgatcgcccggataaccaaacgttttcagcagcgcagcaaagaattggaaggaacctctgataagaccattacaggataactgaaaaaataaaaaccacctcctgattcatcaggagatggtttcacggtttaaagctcgatcgtctcaccgaccgacatgactttgccgactccgcccggcaggctgtcagcgaatgcttctgggtcttgttcgatgaccgggaatgtattgtaatgcaccggcacgacctgttttgcgcgcagccattcagcagcaagcttggcgtcttcaggccccattgtaaagttatcgccaatcggaaggaaagcaaggtcgatatgattcaattcgccaatgagtttcatatcagagaaaagtgccgtatcgcccgcgtggaaaatcgttttatcttctacagtcagcaaaataccggcaggcatgcctgtgtaagtgatcgttttgttttcttcatctgtgatggctgatccatgaaaggcctgtgtgagcttcacttttccaaaatcgaactggcgggagccgccaatatgcattggatgaacattcaagcctttccagcctaagtacacagcgagctcgttcggggctataaccaacgcgttattttgcttggcgatttgttcagtatcaccgacatggtcattgtggccgtgcgttaataagatgacatccgcttttacatcctccggctttatatccgttaatgaattccctgttaaaaacggatcaaaaataatatgatggtccttcgtttccactgtgattacagaatgtccgtgatatgtcactttcatttctttcacctcgtcacatgattttgatttttttattttccctttttaaaaagctgaaaaacttatgttgtttgattcttgttaatgacattgaggccaccggtggcttcaatgacagtccctgtcacaaggtctgagttctcctcacacaagaaagcgataatccgggcgatatcctcgcctgtaccggatcttcctatcggcgttttttctttgccgattcgcattctggcttcctctatcgatgcttctttcatgtcgccgacaatgtctcccgggcaaaccatgttggcggttatgccgaattcggcttcttcaatggcaattgtcttcgtcaaagaagccaagcccactttcgcagcgccaaatgccgatcggtgaagccagccgggcgcgtgagccgcaccttggaatccgtacgtaatgatgcgtccaaattgctgttttctcataataggaataaccgctttgaataaatgaaagacggcgcttaaatttccttccagcatgccataccattcatcatcagtataatcggctaactttttacgttcaaatatgtatggtcccgcgttgttaatcaaaaagtcgatccttccgaagcggtttaaggcagcctctgcaatacgcagcagatcttcttttttggtgacatcaccttttacaaattgcagccggtcaagacaatcgggacaggcttccttcaggcggctgactgcctcctcatcctgtctgtaattgactgttactgaatacccctttgcaagcaacgtttcagtcactttgcggcctaaacccttcgaaccggcagtaattaaagcatgtcgcacatgaatacctcccaaagcaacgtcgccgctttcaataaagtgtttcttcttctactttactataaaaggcttgcaatatcactttttacactttggcatacaaaaaaagctgcctgtacagacagcttattctgcaggagatgaagactcctgatcaggcatatcgacataaccgctttgatatgcttctgaaatgagccttgttgtctcctggctttcttgttcatcataaatatagcgttccggttcttttttcatcattctgcctcccatcattatagaggtaggttggctataatgacgggattttatgaaggaaattttaacaaactcctgctgctacgcaagctttcgctttttcaagcgcctgctttacctgtttgaatccggtgcccccggcgctcattcttttttcaactgcgtagtaagggtctaacacagtgtaaatatcttcttcgaatagtgtgctcgcctgctgaaactcgccaaacggcatatcgcttaaatagatccctctttcgatgcatgtgtacacaagtttcccgaccacttcatgcgcttctctgaacggcattccctttttagctaaataatccgccagttccgtcgcatttgaaaagtcttgttttgttgcttgcttcatgacgtctttgtttacagtcattgtttggatcatgcctgtgaagatttgcaggctgccctccaccgttttcaccgtgtcaaacatgccctctttgtcttcctgcagatctttgttgtaagcgagcggaagtcctttcatgatcgtaaacagccccatcatatcaccgtatacgcgtcctgttttgccgcggatcagctccgccatatcagggtttttcttttgcggcatcatgctgcttcctgttgcgtacgtatcgtcaagctcgatgaatttaaactcctgcgagcaccataaaatgatttcttcagagaaacgggataggtgcatcatcagcatactgctgttgcttaaaaactccaaaatgaagtctctgtcgctgacgccgtccaagctgttttcataaatggcatcaaagccgagcagttccgctgaataatcacggtcaattgggaaggttgttcccgcgagcgccccgcagccgagcggagatttgttaatccgcttcattgaatcctgaaaacgctccttgtcgcgctcaagcatccagaaatacgcaagcatatggtgagcgaatgaaatcggctgggcgcgctgcagatgtgtgtagcccggcagaatcgtttcaacgttcgcttccgccttttcaatcagcgcactttggaatgcctcaatcagctcgatgatgtggccgacatgattcttcaagtataaatgcatgtcagtcgccacctggtcattccggcttctgccggtatgcagcttgccgccaagaggaccgatttcgtcaatgagcattttctcaatgttcaaatgaatatcctcataatcgactgagaattccaatgctccctcctctgctttttgcaaaagggtattcaggccctctcggattttcaactcttcttctgctgtcagaataccgcattttttcagcatggcagcatgtgcgagagaccctgtaatgtcttcagcaactaaattttggtcaaatgatatggacgcgccgaactcgtcgacccatttttccggtgttttttgaaatcggcctccccagagcttcttcatgctttaatctgctccttcttttttacgatgctgttcacttttgtcggaagtccccaaagctcgataaatccaattgctgcatggtgatcaaatgcatcgtcttttgtatatgttgcaagtttttcatcatatagagagtattctgatttacgtccttctacaattgcatggcctttaaacagcttcacgcggacaatgcctgtgacatgcttttgcgtttcttttaagaaagcgtgcagcgcatcttttaacggcgagaaccataagccgttgtaaatgatctctgacattttttgctcgatgatcggtttaaagtgggctacctctttcaccagtgtcaaatcttctaattctttatgcgctttgatcagtgtcatcgcaccagggcattcgtatacttcccgggatttaatgccgacgaggcggttttccacgtggtcgatacgtccgacaccgtgcgcgcccgccatttcattcagcttcaagatcagctcagaaagcgagtaggaaacaccgtcaatggagacaggcacgccctgttcaaatgcaatttcaatcacttccggcgtgtccggcgttttttccagcggagctgttaaatcgtatgcaccttctggcggcgccgcccatggatcttctaaaatgccgcactcattggcgcgtccccagaggttttgatcgatagaatacgggctgtcaagattgatcggaatcggaatgccgcggctagccgcatattcaatttcttcttcacgtgaccactgccattcgcgaaccggcgcgatgacttctaggtcagggtttaatgatttaatggagacttcgaaacgaacctggtcatttcctttcccagtgcatccatgggcaatcgcctgtgcatcttctttttccgctatttcaaccagctttttcgcgatcagcggccgagataatgccgaaacgagcgggtattttccttcatacatcgtgtgggcctgcaaagaaataagcgcgtaatcctgtgcaaattcttcttttgcatcgatcacgtaggagtttgtcgcgccgacttcaagcgctttctgctgaacaaatgccaaatctttgccctcaccgacatccaggcagcaggcgatgacattatatccttgctcctgaagccattttattgcgacggaagtatcaagaccccctgagtatgctaatacgacttttttctgttctgacatgataaaaatcccctctcaaccgtgtttctattttgtataaaaataaattatatttaataaaaatacattttgtatgtatacactttaacaagtacgtttcgttttttcaagccttttacaaaaaaaacttcacctaaatttcaggtgaagtttcgtagtatttattcatttacttgtcttttctgatttctctgaccacatgtgcaagttcgggaataatcagcttattcattgccagctttaccgcgccgcttgagcctggcgttgagaaaacagcggtatgctgaatgacgccggcagttgctctcgacatgattgcggcagggccgatatcctctgtataactcagcatcctgaatatttctccaaagccgggcagttctttcgaaaacagcggcgttatggcttcaattgtgacatcccgatctgctatgcctgtccctccgtttaagagtaccgcgtctgtctgttcatccatgcagcccgcaagcactgaccgctgcaaagcatccttttcgtcttttacaatttcatatgcggcaatatgatgaccggcttcttctaaaaatgagatcatcagcttgccgcttttatcggtttcatctgtcctcgtgtcactgacagtaatcactttgcaccgaacgatatcgggagcttcttgtttatgctcttgaacgctcattggcccacctcttttatgttttctgtctgtcactatcatgcatcaacaaaaaagcacattcaagagaatgtgctttcatgcgatttattttgctaaacgaacaacgtcgcgcgcaatcatgacttcttcatcagtcggaatgatcatgacttttactggagaatgcggatagctgatgaaagcttcctcgccgcgcacgttattaagcgcaggatcccagtatacgcccatgaattctaaaccgcgaagaacgcgttctctgacttccacactgttttcaccgataccggcagtaaagatgatcgcatcgacaccgctcattcttgcagcgtaagaaccgatgtatttgtggattctgcttgcgaatacttcaagagccgtttccgcgcgctcatttccttctttcgttgcttcaacgatgtcacgaagatcgcttgagaaaccggaaatgccgagcagtccgctttttttgtttaatgtattcagtacttcgtcagccgtttggcctgttttctccatgatgtatgggatcagggcagggtcgatgtttccagagcgtgtgcccattgctacaccggcaagcggcgtaaagcccatggatgtgtcaatagattttccgccttcaacagcggcaatacttgctccgtttccaaggtggcaggaaatcaggcgcaagtcttttaacggacggccgagaagctctgccgcacgctcagttacatatttatgtgaagtgccgtggaagccgtatttacggatgccgaatttttcatagtattcatacggcaggctgtaaaggtaagactgctcaggcattgtttggtggaatgccgtatcaaatacagctaccgcaggaacatttggaagcacttctttgaacgctttaattccaacgatatttgccggattgtgaagcggtgccaattcagaaatatcttcgatttccttaatggtttcatccgttaataaaacagaatcgctgaatttttctccgccgtgaacgacacgatggccaattccgtcaatttcattcaagtctttaataatgccgaattccgttaacttattcagcagcattttaacagctaccgcatgatccggaatatcagttacttctgtatttttttcgccgttcacagaagttgtgaatacgctgtcggcgataccgattcgttcaactaaacccttcgttaaaacggtttctgaaggcatttcgaaaagctgaaatttcaaagacgagcttcctgcgttaattgcaataattttggacatgattgacgctcctttatactctgtatcaacaacttcgtttttcgtacttttttcccggtgaatatcaacatcttctccgaaaaatatctgacttttccatttaaacattgtcatgtcggcttttcaagtcaacttgcgtattgataacgcttacaataagaagtcgttattttcagacacattccctataggttttgtattgatgaacgcttacaatttgcggtttttccctctgtattttgtgtttcaaagctggattcaattcgtcaagtccggtcttcaaaagcataaataaaagcagcttaggcatcgacctcatacggctgtctaagctgcttttaaaacacttacttttcttttttaaaccattcatcaaattgagccatcatatcaagcatcgccttttgattggagaaagacggaagattcgcaagcagaatttgccccggcgctttcgtattctctccttgtttctgaagcacaaggatgcttttggcatgagcttcgtctttaaaaatagattttggcagctgcaacagtgcgttgatatgaaccttatctttgaaaaactgtttcagcttgccgctttgggagctctcaaacaaatgattcggaatcataaaaaataagtagccgcccggtttggtatgcttgacgctctgttcaataaacagatgatgagcgaaggaatggccttcgtcagctttaagctcaaacgcttctgctccttcgtcattcggataatagccgactggcagatcacaaatgaccgtgtcaactggatcgataaacaacggctcaaggctgtcctggtggaaaagctcaagctcttttttcagaaggttcgcttgggcataggcgatcttcaagagcacatcatcaatttcaatgccaaagctgtttgccgttttttcagacagctggttcagcacggtaaacagaaggttcccagttcccaaggctggatcaagaatggtcaattcctttttgtccgccataaacttattcaccaaatagctgatgaaaagcccgatcgtatccggcgtcatttgcctgtttggatgggagatatctttcattcctttaaggacggcaagctgaaaagccttgcgtacccactcatgctcatacgtgccgaattccgctttttcaagcagagcctgaagttgtttggttttctgatcagcaggcagtttcagctgatccgttttttcaagaaaatacatttctcctgcttcggcaagcgcctctatatatgaaatctgcaattcattctttatcataatcgctgcttcgtttaacagctcatacaccgcacctacatggtctttttgcatattgtgttcctccttgccatgaaaaaagctccggcggcagcctggagcttttttccctgcttacttcactaatgccttagcagcctcaattggcttttcatagttcgggtggtttgttgcttcgcttacatattcagcgtaaacgacttttccattctcatcaaggacaaatacggaacgcgcaagcagacgaagttctttaatatacacaccgaacgctttgccaaatgacatatctctgtggtcagacagtgtttccactttgtcaattccgttagcgccgcaccagcgcgcttgcgcgaatggaaggtctgcactgattgtgtagacgttgacatctccaagctttgcagcttcttcgttaaaacgtcgtgtttgtgcatcacaaacacctgtatcaattgaagggataacagaaataatcgttacctttcctttcatgtcagctaacgatttttcttcaaggctgttagtcagcactgtgaaatcaggagcttgatctcctaccttcacttcttgtccgacaagtgtaaccggaccgcctttgaatgtaatttcagccattataattcctcccttttgtatgtatgtctctatcatagtaaagtttcctgcaaactgcaaagtttatgccaaaaaaaagttaactgcggccagcgcagttaacctttttttaataattcatattgttcatttggttttgattttggccctgactttggttcttgttatttttcttgaacatttgctggatgcgttcgagtgtttgaggggctgcgtctaaaattttctctattaaatgggtattttcatctaaatgaagcattctgatgcctgtcgatccgacaattaaaaacgcgatcggcgtaatggacacaccgcccccgcttccgcctccgaaaggaagtttctgttctcttgtctcatcgtcttccgatttcttttcggccggctttccgccaaactcgcttccgcctgcggcgaatccaaatccaactttagaaacagttaaaatcacacttccatcaggcgtttctactggatctccgatgatggtgttaacatcaatcatttccttcaagttttccattgcggttttcattaatccttggatgggatggtctgccatatacgcttcctccttaaactgatgaatcattctttgaagtcattctagccgacggattcttctttaatacggatagctcccgtccgtatttgacgaatttgaaagctgcaagcatagcatgtccaaagcgaaaaaagaatatacactgaaaatgggtcttggaagcaggggcttgaaacgacgggatcacctcatagacaggtttattcacaaagtccaggtggtcgtagagcattgctgcgataccgcccttcacgccccatacagcacctgttaacacacctgtcactgccgcgtcctgaattccgattactgtaacccattctagttttgtgatatgtaaatgcgcgagaaaagacgcgctgattttccgtagtctggtgacctgatgcaaaagcatttcgattttattaatgctttgctgcacatcgttttgtgtaatttttttctttccgctgctttttttcattttagattcagttttttgtttgatatccactgttccgtcttctttgttcaccttaatcgccgggattgtttttttgatccttataaggccaaacagcgccgtaatcttcaaggtcaatttgtcattatcagcggcatgaagatactccagcgcgacatggattttcattctgagaagcagtacgatccctatgagaataagaatggctgtcagtacatacaccatattcttcacttcctctaggagcattatcgccaattcctaaaaaaataaacccggacggaggtccgggttatcggttatttgcggtataatttttcatgcaccacggtggtatccgcgatgtaatcatgaatcccttgttttgtaggtgaaaaagcaacaacgatatataaaatccaaatcttatcaatataccgtccaaccacttcacgaaaaatcactgtactccatgtcagcttgctatcttgcttcacagaaaccactttgaggccgaacaccattttaccaagcgtctgcctgaagtatttagtcattagtgcgaagtaggcaagatacacaataagcgttgtcacactgtaggccgagaaggtaaacatgccggatgttttcggcagatccaatacggtaaagaggggagaaacgagcaaatggtttaatccccatatcacgagccaatcaagcaggaaagcccagaaacgaacccaaaagccagcataggcatgtgtcagctgctccgcttcttgcgggcctttgatgtcattgcgctctaactcttcatatgtcgcgtccattattgttccctcctacttcgcatagagatacatcattctcggcgaaccggattgcgatagaatttctctcatattcaaaaaatcaatttcacttttaaacattttgttcgcgcccatggaaaacagtgagcctaatccgaagctttcctcataagaaatgacagaggcgtttttcaaatccttgtgatcctttttcatggccgtaatggtatcgtcataaaaaccaagctcatcaacgaggttcagttttttcgcctgccgtccgtcatacacgcggccgtccgcaattttctttacctctgctttcgacatgccgcgcccttttgaaatgacatcaacaaagccttcatacgaattatcaaccatcgattgcatgatgtttttttcttctttcgtcatctcacgggaaggagacataatgtccttatgggccccgctcttaatcgtttcataagaaatgccaagcttatcggcaagctttgaataattgacgctttccataatgacgccgagtgacccggtcagggtttccggtgtcgcaaaaaccttatcagccgctgttgagatgtaatagcctcctgatgctgccatcgaacccattgacacgtaaatcggttttttcgtttctttcttgatttcttccagtttcttatgtatttcagcactttcatacactccgccacccggagaattcaccttcagaacgatacctttgaccgtcttgtcatcttttgcgcgctcaaggttttttaagaacgttctgtggttatatccgtctgcaccaagcagactgcttgagtccccattatcctgaatggtgccgctgacctctaatacggcaattttacttgagagactgccgttttccagcgtcttttcctgcgattcatccgtcagtgatgtgagatccgtttgagcgcctttgacgctttcaaagaaactcatagagatgctgacgataatagacacgccgaaaatccccagagcaatcactaatgcaatccatctttttgcattcattttttctcctcctttttcctaaactctctcattatacgattcaatatgaaaaatgtttcacttcatgagaaagctccggcttaacgggctgccggcaaacgtggtacacttatggccaaaggtattttatcacaaatactggatggcagaaaaacttaaatatgacagcaaaggggaaatgggatatgaccgatcaacgccgtaatgtttatttttttcacaaacaggatcaggaaacgaacgaacaagcccgctcgttaacacaattagcggaagagcatggatttaccgttgtgaaccagcactcagacgccaatattatcgctagcattggcggggacggcacatttttgcaggcagtcagaaagacgaattttcgtgacgactgcttgtacgtcggcattaccaaaaaggggaaagctcatttatattgcgactttcatagtgatgagcgagaaaaaatggtcgatgcaatgacgtttgaacaaattgaagtgagaaaatacccgctgattgaagtgacagtggatcaagccagtccttttcactgcttaaacgaggtatccatccgctcaagcatcatcaaaacctttgtgatggacgtgctgattgacgatctgcactttgaaacgtttagaggtgacggaatgattatctcaacgcctacagggagcaccgcctataacaagtctgttgcaggagctgttgttgatccattgcttccatgcatgcaggtatcagagcttgcatcccttaacaataatacctaccggacactcggctcgccatttgtcctcagctctgaccgaaagctgacccttcgtgtggtgcaggacggcaacgaacacccaatcatcggcttggacaatgaagcactcagcacgagaaatgtgaaaacgatcgaaatcaaactgtctaataagaaaatcaaaacagtcaaactaaaggacaattcattttgggaaaaagtgaagcgtacttttttatagaaaataaaaggacaggctgctgcctgtccttttatgatttctcatatacaatctggccgttaatcacggtttttttaatatctaaaagatgaagctgtgcggggtcaatggcaaacggatcaccactgagaactgtaaaatccgcatcatagccttccgcaatttttccgcgtgacttctctttataaatgataccggcgctaccttctgtataaagctttatcgcttcatatacaggtaaacattcactttcattatagcttggcccgttttgctcatgactgcttttcctgaggaccgcggactggatccctagaagcgggtcaacaggctcaatcggggcgtctgaaccgcccgcgcataaaatgcctttagatatgagggttttccaggcaaatgcagtcttcatccggtcttttccgagacggtcaatgacccacggaaagtcgcttgcaacgaaatgcggctgaagatcaagtgcgatcggcatgcgtgctgctctctcgattaattcgttatcaagcacttgggcatgaataagccgatcatgccggccgtttttgggcggatgcttttcaattgcgttcagcactttttcaaaagcaagatctccgattgcatgaactgcaacctccatccctttttctctcgctttgcgaatgagccggccaagggtttcatcatcgtgaacctgaacaccatttgttgatggatcatcctgatatggttctttcaataaagccgttctcccgccaagcgccccgtccgcaaagattttcatcgcaccgaactccacatacgggccggacagcttctccagctgctcccatcgatcgaccgcttcatgatgaacgagcaaatggcagcgaaacggatactttccgccagcggcagctttctcataagctttcaacggcaccgaaacatcaccataataggacaagtcttccgaatgaccgcccgtcaggccttttgtccagcaatcctttattgcagccgttaatgcctcatcaacatagtgctgagagactggcgggacagccttcagaatcaaatcctgcgccttatcaaacaggagtccggacggctctccatttgcatcttttacgatgactccgccgtcagggtcaggagtatttcttgaaattcccgctgcttgaagagccgcagaattgacagctattgcatgccggcatatacgcttgagcaagacgggtctgtctggaaacaggcgatcaagatcatgcttagtcaagtagtcaggtgtcccaaactgattttcattccagccctctccaatgagccaatcgtttttaggaagctgccgctctctttccttcgcagcctgtaaaattgaatctttcgacgtcagtgcggacagatcgagctgaagctgtttctcaccgtggccgatcaaatgtaggtggctgtcaacaaaaccggggaacatcactgcaccgttcaggctgatttcttctgtttccggtgacccgtacttttccttcaaacgttcatagctgccggtgccttttatgacaccatcctcaacataaactgcctcagtccgatcgccttcttcgagcatcgtataaatgaaaccgccgtgccatatcgccttcattcacgttcactctctttctttacgcctttttattggctttgagctgttcttcacgttttcttaattccactcgtctgatttttgcagaagccgttttcggcaggctttccacaaattcaatttctctaggatatttgtatggagcggtaatcgtcttcacatggttttgcagcattttgacaagctcatcactgcgtttttcatgattttgcaggacaacatatgcctttacgatggagcctctgatttcatcagggcttgcgacaacagcacattcttttacttctgggtgcttaacaagcgcgtcttccacctcgaaaggcccgatcgtatagccggagctgataataatatcgtcatttcggctttcaaaccagaagtaaccttcctcatcttttcttgctctgtctcccgttaggaaataatcgccgcgaatttgtgttttcattctttccggatctttaaaatactctttaaagagcgcaggcgtactgaggtgaacagcgatatcgccaacctcaccaggtttgcagatttcaccgtcttcatttatgatctccacctgatttcccggtgtcggttttcccatgcttcccggtttaataggcgtatctttcaaaacaccaaccaaaagcgtgctttctgtttggccatatccgtcccgtaccttaatgccaaagtgcttttggaaaacatcaatgacttcacggttgagcggctcacctgcggaaacagcgctgtgcagggcagaaagatcaaagcgttccaagccttcaaccttcgccattaagcggtattctgtcggagtgcagcagaaaacattgattttgtagcgatttaaaagctctagatatttttctgctttgaatctgccgtggtacacaaaaccggttgctccgctgccaagcaccgctaaaaacggactccatacccacttttgccagccaggggcagcagttgcccagacgatatccttttcagaaatgtcaagccaagcgccggcagaagtttttaaatgagcaaatgcccatccatgtgtatgtacaacacctttcggctgacctgttgtcccggatgtataagataagaaagccatatcatctcttgttgtgtcagctgttttaaattggcttccgtccgcttcaattgataagaggtttttccagccggcatcattttcaccaatagacagtgtaatcagtttgtcagtcgtactgacatcccggaaagcgccaataaattcggagtagacgatagcgccttttacctctgcatgttcaatccggtattcaagatctttcgcgcgaagcatttcggagcacggaatgacaaccattcctgatttcaggatagccaaataaacagcataggcttcaagcacccgcggaaccattacaatcagcttgtctccctttttaaatccaagatcagctaaggccgctccgattttatttgtttcttccatcagcttttcatacgaccaagattcttgcttgcccgactcgtcctcccaaagaagagcggttttttgtccagcggcactgaacttttccatttcattcactaaattatattgcataggggcaattaaatcttcacgttttaacacgaacaactcctcactttctccacccattatacataaatacaggctctttccgtaaggatatgcctaaaagcaacctctgtaaacatagattttataggccgctggtccttttttatattataaaaaatgaaaaggagtggggatacccccactcctaagccattatgtgaaattgtaaattagaattgtcctccgcccatgttttgttgagcaaaagatacaagacgttttgtgatctctcctccaacagaaccgttagcgcgagaagttgtgtctgctccaaggtttacaccgaattcagaagcgatttctaatttcatttggtcgatcgcttgagcagctcctggtactaaaaggttgttgctgttacctgagttattgttagccatgtgtctcacctccttgtgagtatagaatgtgtcaaaacacatggcttcattcagaaaaactttggtaattgtatacaggagctgaaaattgatttaaaagagttcagcgaatttatcgttagcttcttgttcgctataaagggtcattgtctcaatgttatctaccgcttcttgaatatacggctcgaaatcaacaaagctttcaaagtgttcaattttctcttttttagggcgtgttttcgggcttggcggtgtaaagatcgtgcagcagtcttcaaatggctgaatgcttgtctcatatgtgccaatttcccgtgatttttcgatgatttctgttttgtccatggcgattagcggacgcaaaatcggtgttgacgtcaccgcattaattgcatacatgctttcaagcgtttggctcgctacctgaccgaggctttctcccgtaataatggcaagcccgtttctcttttctctgattctgtcggctatctgaagcatgaggcggcgggttgccgtcattgtgtaattttcaggaatttgtttttggatgagctcttgcgtttttgtaaatggaacaatatgaagtgtcatgcttcccccaaaacgggacagacatttcgccagatccattaccttttgctttgcgcgctcgcttgtgtatggcgggctgaagaaatgaacagcttctaccgacaatccccgtttcatcgcataaaaaccggccacagggctgtcaaaaccgccagaaagcatcagcatcgcttttcctgctgaaccaactggcagcccgcctgcacctttttcatcacgaattgtcaaaaatgttgcttcttccctgatttcgattctgagcgggatgtctgggttgcgaacatcgaccgtcaatccttctgtatttcgcaaaatatggccgccgatttcagcgttcatctggtttgtatctaattcaaattgcttatacgctctctttgtcgcgactttaaacgtatcacctggtttatactgatctttgatagcctttagtgcggttgccttaatatcatcaaggcggctgtcacatttaattgccaggctgaagctttgaatcccaaacacttgctttaaatgaggaaaaagagcctcaggatcctctccatttaatgtaatcgtcatacgatccctgttggaaaagtattttaaattcggatagtctttcaaaacgagtctgatgttttgttttaagcgctcaataaagctttttctgtttttgcctttggtcgaaatttccccaaaacgaattaatatatgatcgtaattcatgttctacctcatcattttccttaattttttgataccaggacgaagcgcgttcataaacggttctgccacatcgcttgtctggctgtaatttaaactgattctgatgctgcttccggcaatctgctctcctttgcccatctctaagagaaccttgctgggcttatgttcttttgccgagcaagccgatgttgtggagacgaaaatatcctgttcctcaagcatgtgtaaaagcacttccgctttaatccccggtacagagaaattaataatgtgcggcgcgctattcatttgaggcgtgttgataacgacgccctcaatttcactcagccttttcataaacaattcctttgcggcagtcatcgtgtcaagccgtgtgtcaaaatcagcagaggcaagattaatggccttggcaagcgaaaccgctccagcagtatgttctgttccggcccgtatgcctttttgctgagagcctcccgttatgagcggaataaggcgtgttccctcttttacaataagtgcgcctgtcccctttaggccgtgaaatttatgccccgaaattgaacatagatcaatgccggccttttcaattgccaagggcactttatagatgccctgcacataatcgacgtggaacaaaatgttcgggtgcttcttcagcacttcccctgccgcttcaatcggctgcacggaaccgacttcattgttcacatgcatcatgctgacaagcacggtatcgggacggatggctgcttttagatcttcaatagaaacaaatccgtcttcattcacagaaagataagtgatatcaaacccgaacaactctttcagctgttctaacgattccgtaacagatggatgttcaatagaagtggcaatgatatgtttgcctgtttttatctttgacaaagccgctccttttaaagccgcattattggcttctgtggcgcctgacgtaaatacaatatcatatttttttaggcctaaggaccttttgatttgatttttggctgcttgaagcagctgttccgtttcggctccatatcggtgcaaagatgaaggattgccaaagtatcggctgcttgtctgttcatatacgttcaagacttcatcgtaaggcttcgtcgttgaactattatctaaatatatcatcttttttactcctttatgaaagcggtacaaggtatgatatttatgttaccataacaaaatttaatagaaaattacgaaaaactagtattgacttctaatttttttaccatataataagatttgttcgtttcgtcatattatctgacaattaattgacagaatattttaacataattattaggaggatttttttcatgaaacactcactgcctgtcaaagataccattattattggtttcatgctatttgcgttattctttggagcaggaaatatgatttatccgccggaacttggacaagcagccggacacaacgtctggaaggccatcggcggatttttactgacaggggtaggcctgccgcttctcggcattatcgccatcgcattaaccggtaaggacgctaaaggccttgctgacaaagcgcaccctgttttcggcacaatctttactgtcgtgctttatttatcaatcggaccattattcgccatcccgagaacaggaactgtttcatatgaaattggcgctgttccgtttttgactggcgtaccagaaagactttctttattaatatttacacttatctttttcggcgttacgtactatttagcgttaaacccatccaaggttgtcgatcgagtcggaaaaattctgactcccatcaaattcacgattattttaatcattgttctcaaagccatcttcacgccgatgggcggattgggcgccgtgacagaagcatataaaggaacaccggtttttaaaggatttttagaaggctataaaacaatggacgcacttgcttcaattgtatttggcgttgtcgttgtaaatgctgtaaaaagcaaaggcgttacacagtctaaagctcttgctgcagcctgcattaaagcaggtgtgattgccgctttaggcctgactttcatttatgtatcccttgcttatttaggtgcaacaagcacaaatgccatcggtcctgttggtgaaggagctaaaattttatctgcatcttcccattatttattcggttcattgggcaacatcgtactcggagcagcgattacagtcgcatgtttaacaacaagcatcggccttgtcacatcttgcggccaatatttttcaaaacttattccggcattatcatataaaattgtcgttacgattgtcacgttattcagcttgatcattgcgaattttggactcgcgcaaattatcgcgttttctgttcctattttatcagctatctatccgcttgccattgtcattatcgttctttccttcatcgataagatctttaaagaaagacgcgaagtgtacatcgcatgcttgatcggtacaggacttttcagtattttagacggtatcaaagcagccggtttctcacttggatctttagatgtgtttctaaatgcgaatcttcctctttacagcctcggcatcggctgggtgcttccaggaatcgtcggagcggttatcggctatgtgctgaccttattcatcggaccatccaaacagcttaatgaaataagttaatgtcacagaacgcctgcgttattgcgcaggcgttttgtaataagaaaaagagcctgctcattacactgcgggctctttttcatggtcgtgattatctaagcggatatgtcagctttgattttttcaactgcacctggcgcagccttttctacagcggtagctgcaatttcataagagtcgtcataatcaaaagcataaaaacgtctttccgcttctttcagctgttcagataaaatatgattctggcttctgaaccggtttccgaactgaatgattttttcaatgaggatgacctgctcgacaagttcctctgattcccggcttgccctgttgacgatatcttctgcttgtttcaaatgggctccggcttcttccatatttaatggaagttcgtttagttgattgaccgtttcttgaatatgatgatgcgcgttctccagcatctcttgaatatggctcggaatgcctggaatgttgctagtcttcagcagtcttgctgtctcagaaattgtttttttcaaattgctgagcgtctccctcgcctgaagctcttcttttctcagcgcttgcagattttcacgatactcgtcatgctcttttttcacttcttcaatttgcttctctattgaagcaacttcttccactaaaagtgagtaggcaacatgctctgcatcgagcttatctttaacggatgatagcagcttcccaatttcatcaaggcgcttttcaaaagcctgctgtttgccgagctcaccggctgtcagcctgtagctttccttcaccagctcagtttccgccttcgtatgctctttctcttctttaagcttgtcgtaagcaataatcaattcaggcattttgcttagtacggattgaccggcttcaacttcgccctccagctgctgataaacagattgaatattttcgtcaatgagctgcaggattgcggacgcttcatcaatatccagctcagtcatcaggacatgttccgctcgtttcagctggtttgacagattttctaattccttatcaagctggatatgctcaagcttgtaccctttttctttcatttcgccatagccatccttgagctttgcaatctgtccgggcaccgtctgtttacagtcagctaacagcttcggcacatcatctatgtatgactgaagccgttcaagattgcggtcctgctcaagcagtacttttcttgcagtaatatagtttccgccttctgtttcttcttcaaattgtttgatgccgctccaaatttcgtccagatccttttcaaggctgtcataaagctccccgtaaaggtggctgtaagccagcaggttttttcgagatttcgaatagcgctccctcacctgttcaatctcttcacggctcttttcctcacttgtgacaagatcgctgatttcccgaagaatcttttcaatgcttgattcagccgctgtcagcaggtcgtcgatatgaacgagcacttgattggcctttttaaaccggtatttgtctgcattttcctcggcatcataaaggagctcttcaactttcggcatgtgggctgtgacaatctcatcccattcttcacgccacttctcaaagaactcttctgtctgacccgtcatttttaaatgttttattttagacatttcttccacgatcgaccgatttagaatttcaatcttccacgattccagccggtcgatttcggcgtagacttttttcctgaaaaagtagcctgccgcaaacagcgcaagcagtacaattaataatccaatgacaaactccataatgagcccccttgctgtttaccttaatctgtcagggtgttttatttattcagaaagatttcaggatatgtattgagaaaaactgtcgttttcattgttattatgataccatgtaacaaacattttttgaccagaaatcaaaaactttttgtgcaaaatcggcaggatttgactattttttcatggggtgacatcaatgcaaaagcgagacggacatattcacacaccattttgccctcacggctccaatgacacactcagacaatatgcagaagaagccttaaaaaaagggttcgaatcgattacttttaccgaacacgccccattgccgccctcttttaccgatcccacgccgctgaaagacagcgcgatggcgcaagcttctttggaacgctatattcatgaaatttccggattaaaaaaagaatatcgcggacagcttagtatacggacagggcttgaagtcgattatatcgctgaatttgaagacgaaattacattattcctggacacatacgggccatatttagatgacagcatcttatccgttcattttttgcgcacagactcttcctatctatgccttgattatgacgagcataccttcaaagagctgatttcagcctgcggaagcattgaagcggtatatgaacaatattaccggagtatctattcttccattgtagcatctctcggcgtttataagccaaaaagagtcggtcacatcacactcgtccaaaaattcatcaagctgtttccatacagcatgtcagaacatattcgcggcctcgtttccctgtgcctgaatgccattgaagaaaacggaatggagctcgacttcaatacttccggcttaagaaaaacttacgctggcggtatttatatcgaggattggatgctgaatgaagcgaagcaaaagaagatcccgcttgtgtttgggtcagatgcccatcaagcgggagatgtcggatatgcgtatgaggcgtttttggaacggtgctagttggtgagcgccacgtctcctgtccggaagacgcttctgatccaaatcttgatttcttcaaaatacattttataaaaatacggctcgtgcggctgcatgtagagtacttctgaaatatattgaggctggagatagggcatcatcaagagagattttaattggagaataaaatgaggcagcggcagcgttaaatattcacgctgtttttctccttcctcaatgatcagctggaagatatacttttccttcattagatatgtcgacataatttccctgattaatgtggagtcaattgtgacttcccggtagacaaaacgagttaattgacgatgattatgctgataggataaaatatcgaaaaccaattgaagaagctgttcctgagtgctttgagaagagatattgcttgccgctgtttcaagcgttttgctgtagccctcgtaaaactctgaaactaagtgttccatcaagcctcctttgcctttaaaatagtaggagatgtgcgcaacatttacatcagctgactttgcgatttcacggacagacgtgccagaaaatcctttttggttaaaaagcatgacagcagattcaataattttgtctttggtgcttactttcatacggctcactccttcctcttgatactattcaagcagaaagccgctgttcctgtaagaacttatcgacaaatgccggcagaaaagccggaactttgttttatattatagaaaaagtgagggttttccatgttccatgtcgaaaaacaatctggagataaagaaaaaggctatcagcttctgctaaaacagctcgaagccatgaccgaagacgaaacagatcaaatagctaactatgcaaatgcctcagcactgctgtatcattcgctgcctgaagtcaactgggcgggtttctattttgccaaagaagaggatggacagcttttgttaggtccgttccaaggcctgccggcatgtgttcggattcctttcggcagaggggtttgcggcacagcgtacgcaaacggaaaagtggaacgtgttgaggatgtaaactcgtttccgggacatatcgcctgcgatgcagcgtctcaatcagaaattgtgcttccgattcgtgtagacggaaaaattgtcggcgtcttggacatcgacagcccagtgaaaaaccgtttcgacgaaattgatgaaaaatacttaactcaatttgccgaaacgctagaaaaagcgttagcgcagtaatataaaagcccaaaactgatatcgttttgggctttttttattttattgagtcatgaaccatcaagcggtttttcccgctccgtttcgcgctgtagagcgcttcatctgcctcatgcacaagctctttcagcgacttttttgtttctgtcgtccagcaggagataccgcaggaaatggttacctcgggtttcgtattttttctgaccgcgtaaaccagtcgctcggtaatccgtttccccactgcaaccggcacatttggcaaataaatcgccagctcctctcctccccagcgggcaccgacatcatgctttcggatgttgcttttaatcactgaagcgacttgaattaaaatctcgtccccagtctgatggccgtacgtatcatttacatttttaaaattatcaatatcaacaagaataaaaacacccttttgatggattttcatgctgtattgaattttttcatctaaatacgctcgtgaatacagttcagtcagctgatctgttttcacgagatgctcaaggcggtcgcgaagcattgaattggttacagccagtgtcgcgtgatgaatcagcgcctgaaacagcttgtacatttcaaatgtaaaagcgtacagctcctgtttcaataaaaccgcaaagcctaaaagccggtcgttttgaatcatcggagcagccatcagcgagccgtaccccgccttcccaaaaacagactggccattcccgatgaaaacccctttttcaccttcatacagcttttctttcagctcattataaaaatctgacggcttcgcttctttaaaaaatgctgtgctgcctgggagcaatgttaggttttcaaaatggtctatatgaaaaaatcccacttcttctgcctgaaacgattctgccattctcacagccagatcattcattgtatcagtcaatgtcagccgctgattcaggcgtcgtgatgtttcattaatcaattccaaatttgcgatgcttgctttggattgttcgtagagctgggcattttcaaacgcttttcccgcggcgtttgctaacagcgacatttcatcaaggcaggcatcagtaagaaagctgtcacccgttccttcagccttcaacaccccgtatgtgccctgctgtcctttgatcggaatataggcgacagattcatttttccgcaaaatgtctccggacaaatacactttgagcgcaaaggaatcggatttttccccttccatatatagctcttttgcaggaatccctaaacattggtcttgatcgtgcgatataaataaagaaaactcaaaaagagaaaatgtgcttgtcaagctttctaaaagctgcttcagcacatctgtctgatcaagcagtgaatggaacagctctgtcattttgtatatctttttttggtagatcgttttgttatagagtctttcctgtttcatcgactggtttaaaaatgaagcaaccacgtccggaagcccttcaggaatctcttcatcctgcctgcatgcaagatggaaacgcctgccggagccgtcctcaatcagataacatgaagcgtttatttttgaagcggaaaaacgcgcttcaccatctgccagttttgtcacaaagtctgatggtgacggtgtaagcgaaacacacagggttgaaaaataggtttgaatagccgaagtcagccatatgaaagagtcggtgaatgtgactttttcagatttggttaataaaaaatcgagcatatgataatgaaaggcggataattgatctttagtttgttctaccatgtttttatcacctaaaagtttaccactaatttttgtttattatatcataaacggtaaagcaataatggaggaatggttgacttcaaaacaaataaattatataatgacctttgtgtgaaatattgcagcctttttgttcagcttctatgttttcattttgttccttatcaataaggtgtatcgtgtaactctctgctgctggagcgaggatacatgaaaacaaaatgtgcatggtcgaatagagcagacggtttttattttccacaaaaataaaaccaaaggaggagtcacattatggctcgctatacaggtccatcttggaaactgtcccgccgtctaggaatctctcttagcggtacaggaaaagaattagaaaaacgcccttacgctccaggtccacacggcccaggacaacgtaaaaaattatcagaatacggtttgcaattgcaagaaaagcaaaagcttcgtcacatgtacggtgtaaacgaacgtcaattccgcactttgtttgacaaagctggcaaactagctggtaaacacggtgaaaacttcatgattcttttagattctcgtcttgataacgttgtgtacaagctaggtttagcacgtactcgccgtcaagctcgccaattggttaaccacggtcacattcttgtagacggaagccgcgttgacatcccgtcttacctagtgaaacctggtcaaacaatcggtgttcgcgaaaaatcaagaaacctttctatcatcaaagaatctgttgaagtgaacaacttcgttcctgaataccttactttcgacgctgaaaagcttgaaggtactttcactcgtcttcctgagcgttctgaacttgctccggaaattaacgaagcgcttatcgttgagttctactctcgttaatcgttttaaaaacccctgccgctatgcggtcggggtttttttatcgtctgtttcgtcattcgcctcttgctggccaacactttcttgcgcctgctgctcccaatgatcccgctgcagccgttcttttgcaatcgtacacatgagattcacgctttagcgctcctttcatttaaaaggtggtgattggtcgtgtttgccctatctaatatactcttttcctttcattcctatgcggtaaacaaaaagatcctttgccttcagtggcaaaggatctttttcttatttatacgtcacaaggaagtattttttcttcccgcggcgcagaacagtaaattgatcttcgatgcggtcttcacctgatagggtataatttatttccgtctggcgttcaccgttaatgtaaacagctccgttttgaatgtcttcacgcgcttggcgtttagaaggagataatttagattgcaccaacacatctacaagtgaaagctcttgggtgctgtcaacttccatagaaggaacatctttaaagcctacttttacgtcttgagcagaaagctctttaatattgccgctgaacagcgcttgggagatgttgatggcttgctctagcgcctcgcgtccgtgaacaagtgatgtcacttcttccgccaggcgtttttgcgcttcacgtttttctggcgccgtttctgttttttcagcgtatgcttcaatttcctcttttgaaaggaacgtaaagtatttcaagtatttgacaacgtcacggtcgtctgtgttgatccagaattgatagaattcatatggcgatgttttttctttatcaagccagatcgcgccgccttccgtttttccgaacttcgtgccgtctgcttttgtgacaagcggaatcgttaggccgaacgcttttgctccttcttcttctgattttctgatcagttcaagacccgctgtgatattgccccactgatcgcttccgccgatttgcagtttacagtttttgtctctgtaaagatttaagaaatcataagattgaagaatcatgtagctaaattccgtgtacgagatgccggattcaattcttgagctgaccgtatcttttgccagcatgtaattgatgccgaaatttttaccaacgtcacgaaggaaatcgatcacattcattttgccgatccagtcaaagttgttcgcgatgacagctgggttttctgctgcttcaaaatctagaaatctggacagctggtttttgattttttgggaccattcggatacgatgtcagcagtgtttaatgtacgctctgctttttttccgcttggatcaccgatgaggcccgtcgcgccgcccacaagcgcaatcggatgatgccctgcaagctgaaaacggcgaagtgttaaaataggcagcaggtgtccgatatgcaagctgtctgctgtagggtcaaagcctgagtacaagcggattttttcttcattcagctgtttatttaacccttcttcatctgtcatttgctgaatcaatccgcggaaggataagtcttcaagtaagttagtcataagataaagctcctttttgattaaaataaaaaacgccccttcgtttacacgaagggacgattgattatcgcggtaccaccctactaataagagaatgcaaacattcgtcttatcactttgcctgataacggatcaggtccgttctttcactactgaaagcctggccggctttgtttgcaaaagcggttcatgagtgtattcgatatatccgtctgtgctgattttcaccggccatcagctctctggaacgtaaggatattctacttgtctcaatctttaccttttcatatgaagctatatcatttttaacataaataaaatcctgtgtcaacgccgccttttaatcctccattgttgacagatctccagccggcagattaagctcccatgccttcagcacgcgcctcatgatctttccgcttcgggttttcggaagcttatctttaaattcgatctcacgcggagccgcatgggctgcaagaccctgctttacaaataggcggatctcttctttcagtttatcagacggctcaaatccttccctgagtgcaataaaggctttaatgatttctccacgcaccgggtcaggctttccgattacgcctgcttctgcaatagccggatgttcgacaagcttgctttccacttcaaatgggccgacgcgctcaccggaggtcatgatgacgtcatcaactctgccttggaaccaaaagtatccctcttcatccatgtaagcagaatccccagacacataccagccgcccggcatgaaatacgattcatacttttcagggttattccaaatggtatgcatcatggaaggccagccctttttgatggcgagattgcccattcggtacggcggaagctcgttgccttgattgtcaacgatcgctgcctccactcctggaatcggcttacccattgaacccggtttaatatccatgcaaggatagttgcagataagctgactgcccgtttctgtcatccaccatgtatcatgaattcgtttgttaaaaactttatgtccccatctgatgacttccggatttagcggctcaccgacactgagcacatgccggagtgaagttagatcatatttcgcagccatttcatctcccgctcccatcagcatccgaaaagctgtcggcgcgctgtaccagacattgacgccaagctgttcaatcgtaccataccagctttccgggctgaaacgtccaccgacgatgacatttgtcgctccgttcagccacggtgcaaaaatgccgtataccgtacctgtcacccagcctggatcagccgtgcaccaataaatgtcttcttcctttaaatcaaggacccactttcctgtttgatattgctgaatcatcgcttcatggatatgcagcacgccctttggcgtaccagtggaacctgatgtatagtgaagcagaaagccgtcttttttatccatccattcgatatccagtcttgtgctttcctgtttcgctgcttcatcataattgatgatattcgtgccgctctcagcctctcccccgactacgaagacatgctgcaagtgaggcagtttgtctaccggtattctctccagcagctcaggtgttgtgacaacaacctttgcctcactgttttcaagccgatctttcaccgctccctccataaatgcttcgaacagcggcccggcgatggcgccaattttgattgcgccaagcataataaaataaagctcgggtgatctcggcataaaaataaaaacgcggtcccctttttccacatttccataccgtctcagcacattcccggctctgtttgattcttccttcatttctttaaatgtgtatttttcatcccgttttgcgtctttataataaagcgctactttgttttttcgaaacgattcggcatggcggtcaatcgcttcatacgccgcattcagtttccctgtctcatgccaagagaaatgtttctctgcctcggcccaatcaaaatgccggtacgtttcttcatagttttttaagttatgatccccctctattgctggtaacgctttcaaattcatgcccaaacatccccctttgctgaagttgtcacaattattatagtatatattcatattcttctcaatttttaaaatataaaccaggttgaaaacgctttataatttggtattcttaaagaaggcatgtatttttgataagaattgatgggacggtgaattagtggaacatcataaaacataccattcagcaaacatcaaaacagcaaccggctctttactgatagaagggcctgtctctccagaggatttggcaggttatgagtttcataaagatttaaccgcatttcgcccgcctcgcgagcagcatgaagcgctagtcgacattgcaggccttcccgaagggcgcattattattgccagagacggccgaaccattgtcggctatgtcacgtatttatatcctgacccgctcgaaagatggtctgaaggaaatatggaggatttgattgagctcggagccatcgaagtagcgccggactatcggggatgcgctgtcggaaagacgctcctgaccgtcagcatgatggatgaacaaatggaaaactacattgtgatgacgacagaatattactggcattgggatttaaaagggatgaaaaaagatgtgtgggaatacagaaagatcatggaaaagatgatgaatgcaggcggattggtctggtttgcaacggatgagccggagatcagctcccaccctgcaaactgtctgatggcccgcattggaaaaaacgtcagccaagaatcaattgagcaatttgacaggctccgtttttatcatcgttatatgtattaactgacactgacaaaggggaaaaaataatgattgttgagcaaatcatgaaaagagatgtcattacattaacgaagacagatacgcttgaaacagccatatgcaaactgaaggaattccatatcagacatctgcctgttgtagatgaagaacgacacgtgatcggcatgattacagacagagacatgaaacaggccagcccgagtatttttgaagaaaacaaacgaagcctatttctcacacgaagcgtagattcaattatgaaaaaggatgttgtctgcgcccacccgttagattttgtcgaagaaatatcagccgtgttctacgagcatggcatcggctgccttccagtggtgcaccatcaaaaattaataggcattttaacaaaaaccgatttgctgcggacgtttgtcaaattgacaggcgctgaccagccgggatcgcaaattgagataaaagtaaacgacatcaccaaaagcctcgctgagatcagcagtctttgccaagaccttcaagtgaaaatattaagcgtgcttgtttatccgcatgacgatcccggtgtaaaagtgcttgtcttccgtgtaaaaacgatgaatccgctgccgtttttgcaggcattacaaagaaatggacaccacgtcgtatggccgtcagagcaaagggatctgctatgagagacagtgtatttatctattctccatcctaccaaacctatatgtttcatcaggagcatccctttaatcagcagcgggttctgttaacatatgatttgcttaagacgatcaatgcctttgatgatggagacattgtcacccccagactcgcttcagaagaggagctttcccttgtccacacggacgattacattcaggccgtaaagcttgcgggcgccggaaagcttcccgctgaagaaggagaaagctacgggctcggcactgaagacacacccgtctttgccggcatgcacgaagcggcatcactcttggtcggcggcactttaacggccgcagactgggtcatgtcaggacaagccctgcatgcggcaaaccttggcggagggcttcatcacggctttcgcgggagagcatcaggattctgcatatacaacgacagcgctgtggctattcaatatatccagaaaaaatatagcgccagagtgctttatattgatacggacgcccaccacggggacggtgtgcaatttacattttacgataatcctgacgtatgcacgctgtccattcatgaaacaggaaggtatttattccctggaaccggccagatccaagaaaaaggcagcggaaaaggatatggctattcctttaatattccgattgacgcttttacagaggatgattcttttcttgaggcttaccggacagcagcttcagaagtcgccgcgtatttcgagcccgatgtcattatcagccaaaacggcgccgatgcccattactacgacccgctgacgcatttatcagcaacaatcaatatatacgaagaaatcccccgtcttgcacacactttggctcatcaatattgcggagggaaatggattgcagtcggaggcggcggatatgatatttggcgtgtcgttccccgcgcctgggccagaatatggcttgaaatgaagggaattgacccgggatacgagataccgccggaatggattgctaaatggcaaaaacaatgccccgtggcccttccgtcgagctggagcgatccggctgatttatatcctccgattccccgcaagcctgaaatcacagaaaaaaatgcccaaactgtcagcaaagcattatatgcgatacgctctgaacagcaaagaacaaagtaaaaaacgacctttacgaagaggtcgtttttgattttttgatcactatttccacacgccgattttccttcatgtgttcatttgtcttgttatccttcaccggctttgtatccgcataaccgacagcaataaagcgcttggagggaagcttctcttttgacgtgaagtattgaatcactccacttgcccgtgctgctgatagctcccaattcgacgggtatcggtatgtcgaaatgtttcggctgtctgtatgcccctccacctgaatgtcatttggaatggtttgaagaagaacggcaatttggtgaagaagtgtttcggcatttttcagcacctttgcctcacctgtatcaaacagcacagcctcctgaagaacgagcacgacaccgcgttcatcccgtttggctgtcatttgggccttcaaatgattgtcttttatatatgtatttactttcttgagaagctgatcctgctgatcctcttgcttcttcgtatcagatggggatgtattctttttttctatggatgtttggtccggctgaagcccgttgccttccttctggatcgagtccactgcagctttgaatttttgcagatcgatttgggacatcgaaaagagtaaaataaagaacacaaggatcaaggtgatcagatctgtaaaggttaccatccagctggatgaagattgactgttttttccgcttccattccttctgtcaaaacgttctcttctaagcttcatgtacagatcccttttttgtttttacttgttttggctgcttcttccattcttcccgtgagctgaaaacgaccagctggctttcaaggttgcgcgggttttttccggattgaacaccgataatcccttccaccattacctgcttgatgaaaatttcactttctgttttctcttcaagcttagccgcgatcgggttgaagaccatatttgccagtaatgaaccatataaagtcgtcagaagcgcaatggccatgtttggtccgagcatatgcgggtcgtttaagtttttgagcatcagcacaagcccgacgagtgttccgatcattccccatgccggagcgaattctcccgctttttcaaaaactcgccgcccttttcggtgccgttcctccattgctgcgatttctgaatccatgacgagccgaatcgtttcttcatcccagccgtcaatcgctaaaagcagcccttttttcaagaatggatctttgatttcccgagcctgatcatccaatgataaaagcccgtgttttcgcgcgtgatcggaaagggaaacaaaggttttcacaagatctttcacattgtcttcctggcggatgaatgcctgctttaacacagagggcgcttttttcagctctcttggcggaaaactgataaaaacagcggcgcaaagtccccctgttacgatgaagaaagaggtcagatcaagaaaagagcggaaaccgcttactcccgatcctgaaataatcccgataacaataataatcgttcctaacacaaatccaacaggtgtaagataatcaaaacgtttcatcatttctccccatgaaaaaagcaagaattcaccataaaggtgaagcttgctctttgtttttcttatgacttggttgactttctaagctctatacggtgcggcagttcgacgatatgctcttcaaccggctctttattcatgagcttcgtcagcagtctcatcgcaacggcgccgatatcatatgtcggctgaacaactgttgaaagctgaggacgaaccatgaggcttaatcttgtattatcaaaaccgataatgtcgagatcctccggaatggataagccctgatcctgagcggcatggataatgccgagtgccatttcatcagttgcagaaagaatggctgtcggttttttatccaggctcatcagatgctgcagtgcttcgagtccggaatcatatgtgtaatccccttcagctacaaattgttcattaaacggaaggttcgcttcttcaagcgcacgtttgtagccttggagttttttcgaacggttgatcggttctgccattggtccggaaacgaacgcgatgtctgtatgtcctttatcaaccaaaagcttcacggcatcataaatcgcctgttcgtaatcgatagcgactgacggtgtttcctcctgctcttctacagaagcggcaagtacaatcggcactggagaacgcttaaattccgccacatgctcgtccgtaatgtttccgcccataaacacgatgccgtccacttgtttgccgagcattgtgtttaacaagtgcagctctttctccatgttttggtcagagttgctcaaaataatattgtatttatacattgtcgcgatatcttcaattccgcgcgcaagctctgaatagaaaatgcttgagatatcgggaatgatgacacctacagttgttgtttttttacttgccagtcctcttgccaccgcgtttggacggtaaccgagacgttcaatggcttccaagacttttttcctcgttgtcggttttacattcgggttgccgttcacgacacgggaaacggttgccatgcttacattagcttctctcgctacatcgtagatcgtaatattgctcatcctaaaaccactccttttactggatacacttatccttatctatagcataaacactttatgtagagaaatgtcataatgtccgaatttatgtcgtttatgatttgtaagcgtaagtcagtagtgtacattatttttcattattcatcaaatttaattacttctcatgaaattatacacgtttttatagatgatgaaaacgtatacttggtttttataactaaataaacgagaaagcataaaaaaaggccgcaggcgcggccttttggattgttcaattaagcgttgactttcaccattggcttcagttcattcagccatttttcgaattcaggaatcgccatttgctgagcagagtcagaaagtgcgactgacggatcagggtgaacctcagccattacgccatctgcaccaatcgctaaagcggctttagctgtcggaagcaagaggtcacggcggcctgttgaatgcgtaacatcaacaaagactggcaaatgcgtttcttgtttcaaaatcggcacagctgaaatatccagcgtgtttctcgttgctgtttcatatgttctgattccgcgctcacaaaggataatttggtcattcccttgtgacatgatgtattcagcagcattgatgaattcagagatcgttgcagcaagaccgcgcttcagaagcactggctttttcacggcgccggccgctttcagcaattcgaagttctgcatgttgcgcgctccgatttgaatgacatcaatgtagtccagcgcttcttcgatatgagccggagttacgatttcactgataaccgccagatcaaattcatccgctacacgttttaaaatttgaaggccttcaacaccaagcccttggaaatcgtatgggctcgtacgaggcttaaaggctccaccgcgcaaaattttaatcccttgttttttcgcagctgcagcgacttcagctacctgctcatagctctctactgcacatgggccgacaatgaatctttgctggccgtctccgattttttcgcctttgatatcaacaattgtatcttcaggttttttcttgcgggagacaagcagcgctttgctgtgatcttcttcctgaagctctaaaccggctttgaatatctctttaaaaatgtgctggatggttgaattttcgaacggcccgtcattgttttcaatgatattgtttaacattgtgcgttctctgacagggtcaaatcggttgacgccctgtgcttccttcgctttaccgatctcttttacaacatttccgcgttcgttgattagttttaaaatttgtaggtttaattcgtctgctttctgccttaaaagctctaactctgtgttgctcatttttttcatcctttccctgcacattcattttttattttgtagttatcatgcatcttactataagtaattccaaatggaaatactgaaatacaaaaaattttataaaaactctactttattacccaaacgcttttaagtgataaagtaatctatgaagctatcctacatgatgtgagggcaatgttcaagggttttttacaaaaaaaagcgccagatgatatctggacgcttttttctatgacaaatgctgctcaatagcggcttctgtaatttgtgaatgtgaggtatgccatttcacttcaccgttctggatgatgaatacctgagggctttcatgcttgaccccatatgtttctgcaatgaaattggacagcggccgggcttcttgtacttgaagatagtaagccggcacatcctcatgctgatttgcaaaggcatcaaactcatgaaatgctgcctggctgatcgggcatgtggtgctgtgtttaaagaagacgaaaacgccttcctgttctgcaatccgtttaaattcttcctcagattgaataagctgtttagccatgactcaagctcttccttccctgctcagcgattcaactgctcagcctgtttttgtgcatctttcagttcgtcttttacatcttctttcgtctggaggacttgatcttttgtttcatcagccgcctgcatcgcttcttccctcatatcctgcattgcagtcgatgaatccgttttgtcagatttggaacggtctctcaaatcctttaccttgttcatgatctgtccagactgatcggctacaagctgtgtgatgttggaagttttgtcttttgcgatgctgacatattgcgtgcctttttccttcgcatctgccgtcattttatcagttttgtcccgtaaggcaacagcctggctgccgagatcgtcgcgaagttctttgcctgatttaggtgctagaaaaagagctgtagtggcaccgatgattcccccgattaaagttccgattaaaaaatctttactattaattccatctttgctcatcattattcctcctcttagtatttttttctcttacagggctgattttttcttttgcttccatttctcccaaatttccattgctgcttgactccaagtgacaacttgattgatcttatcttgattttctctaactgatgccgatacagaccctgccgcttgtttcatggatgtattgaactgctgtacagaagctcccactccttgaacagcatgaacgaccgtgttcagcttttctgatttttcctgaatatcttcagccaggcggttggtcttatgtaaaagctcggctgtttcagttgtgatgcccttcatttgtccctccagcccttcaagagtggatgcgacgttttttagtgtcagctgcaatgacttcagtgttttagacaagtagatcactaatacgagaaatgcaactgcgatgagtgcaacgctcaaataaagaataataatcatctcaaacctccttgctgcaggatatactgctgtttacccgttttcttcaatcataaacatgtgtactgggctgtatacatactattctccgttatgtaagaaaatcctttaataagcttttccatcagataaataaaaagcagtgagatcactgctttttattatgccatgacgttttcgtaggctctcatatatttttggatatctcctgctcccatgaagatgagaacggctttatcatgagcttttaaaacagatgtgtcatcttcttcaatcagcttggcattatgaatttttccctggagatcgccgatcgtcagctttccggcattctcacgggctgagccgaaaatatcgcataaatacacacagtcggcgccgctcaggctttctgcaaattcgtcaaggaactgctgcgtccgtgtaaatgtatgaggctggaataccgcgacaatttcccgatcaggatacttctgtcttgccgcctcgattgtcacttttatttctgtcggatgatgggcatagtcatcaatcagcacttgatccccaagctgcttctcattgaatctgcgtttgacgcccccaaaggatttgagagcatgcttaatgatgctggaatcaatttcttcataatggcataacgcaatgaccgccaatgagtttaatacattgtggtggccgtacgcaggaatataaaacgtatcatagaacgtattgcggacaaagacatcaaaagttgtcccttccgtgctttttacgatgtttctcgcttgaaaatcattttcttcccccgtgccataatacacaaccgggacgttcgcatggattttcggcagatgctcgtcgtctccgcaggcaataatgcctttgttgacttgaagagccatctcttggaaagcgtcaaatacatcgtcaatgcttgagaagtaatcagggtgatcaaaatcaatattcgtcataatcgcgtaatctggctgatagcttaagaaatggcggcggtattcgcacgcttcaaacacaaagtattcgctgttttcatttccctggcctgttccgtctccgattaagaaagacgtcggttttgcgttttggatcacgtgagccagcagacccgtagtcgacgttttgccgtgtgcgcccgtaacggcaacactcgtgaattttttcatgtagtcgcctaaaaacttatgataacgtatcaccggaattccctcagacatcgctttttctatttcaggatgcgtgtctgggaatgcgtttccggcgatgactgtcatgccgggtttaatattctccgcgctaaaaggaagaaccgtaatatttcttttttcaagcgctgtttgcgtaaaaataaatttttcgatatccgatccttggacagtatatccattatcatgaagtatttgggcaagcggactcataccggtcccttttattccaacaaaatgataaacagtcataattgtacctccaacaaacgtctatctgttccccagtatatgacgctcatttcaatttgcgaccgcggcggctgaaaagcctcccttagcggcgtattttatatgttttgttatgtttagtatcaggttatttctttccgattaaacccagatatcaagatttgtctatgcacagctgctgtaaagcggcatagctgttaaatgctctaaacactatcataccatgtttggtgtgaaaatgaacccatattattcgtttattaaatcacttgctgtgatcagcacctcccgaggcttgcttccttttgcctcagagatcatgccttccgcttccatcatgtcgatcagccttgccgcacgattgtaaccgattctgaatcttctttgcaggcttgaagtgctcgcactgttttgctctacaacaaactcacacgcttcgtaaaacagttcgtcctcttctttcagggcagatccttgtcttacgagctcttcttgttcaaataaataggtcggcggcatttggcttctgacgtgggaaacgacgcggtcgatttcccggtctgacacaaagttaccttgcagacgaaccggttttcccgatccgttttccaaaaagagcatatccccttttccgagaagcttttctgcaccggctatgtcgataattgttcgggaatcaacctggcttgaaacagaaaaggcgattctcgttgggatattcgccttaatcagacctgtaatgacatcgactgacggacgctgagttgcgacgagaagatggataccgcacgctctggctttttgggcgatccgcgcaatgctttcttccacatcgtttggagccaccatcatcaaatctgcaagctcatcaataatgacaactaaatatggcagcttttcacccatttggtgttcagcggttaattgattaaagcggtcaatatcgcggacacctgaatgggcaaaaagctcatagcggcgctccatttcctcaacgacccatttcaaagcagctgtagccgctttggcgtcagtaatgaccgggctgacgaggtgaggaattttattgtaaggggccagctctaccattttcggatcaatcagcagcacctttacctcactcgggtcagctttataaagcaggctgactaatattgtattgatgcatacgctttttccggagcctgtagcaccggcaatcaagccatgcggcattttcttcaagtcgataacaacaggatttcctgaaatatctaatcccagcgcagctgtgagcggtgacttgcttgtcctgaaagctgagctgcgaatcatttggcgcaaatcaaccaccttgctcgtgcggttcggcacttcaattccgatcgtgtttttccccggaatcggcgcttcaatccgaatatctctcgctgagagactgagtttaatatcatcggacaagttggtgattttattcacctttacacctggttcaggatgcacttcaaatctcgtgacagacggaccctgggttacatggaccacattggcgcggacattgaagtttttcaaggttaaatcaagaagctgacgctgttcttcgatccacgcagtatcatcttgaacctgcgctggcgggacatcaagcagtgcaacattcggaaatacatagctgccgcggcgctcctctgctttttgctgtttatgcgtatctcttttcagcatcatcacattaaaaggaacggatggccctttttgagaagatgcgctttgttcagtccttttctcctgtacaccaggcctttttttcggctcttctgaagcttcgcgaggtttgtctgcgcgaattccctgccggttttcaagagttgcagtaaacgatttggaaccctgctccatgtgttcagttttctcaagctctgtatggctgtctggctgaacatctatcttcgtttcctgagcctctcccaggatgtcataatgattatttattatgctgtctgatggctcttctgattcttttgccacagtttctgcttgagccagagcctctgatgaatactcatgatcagtaaataaaggctcttcctgacgaatgtccatttgttcttcttgaacgaacggggactcagcaccttcttccgcgttttcatgatgattgtatactgggctgtctgacggctcttttgctttttcatcctcagatattgcctctgtctgagattcaggagctgtttgctcttcatcaagttcagcggagaaaacaggctcttcaaatttctctggctgctgctccctttgttcttcctcagccgttgcaggctcttcgcggcctacttcactgtctgaaagcccttcagccgccgtatctgtgagcatctcaggcggtgtttgctcttcggcatgttcagctgggaaggaaggctcctcttcttccggctgttgaacgcctgactcaaatggcactttgttacctgacggctcggctggccttttcgccagcgcctcatcattctccgtatcctttctgtttaaaacgccagaaggctgtttttcaaattgggtatccgggaagaaaggactttcttttttggaatgcgcctgtgtgtctgaagcaggatagccgcgttcacgttcgatctcttctgacagcagtgttaccttctcttttaccgatttatccggttcgttcaatgtttcagaaggctttttcggcacatcctttttaacagatggtttttgattgaatccatagacaggcgaagggatatttgtcggtttaaacggtttcttcgccggctctgctgcttgatatgtatgctgctcttcttcatttctgggacgctctctgtaaggtgcagcacttggacgaggcgcggatttcggttcgtccgatggtgtgcggcgccttctcaggtcatgatttttgtatccgtcaggcacgactggaaaacggaatttgccttttggatattcataatatattttaggatcttccaatctttttaattgtccttcaggatgatgtacttcttgttgctgcggaatttgagcgggttttgtctcccgttcagcatcctcttcgctttcgcctaaaaacaaatcaaaaaatttatgaagccaactcataatttatctctaactcccttatagttttctgggacggtttttagtataccactgctggtcggcccagaaaagattaagctatcagcagaaacaaagccgctaaacaagggcttagcggcttttcacatgattcgttttttttggcggatttatgggagtctaaaaccgaaatgcgtctcctgcctcatagtctccttctaacacaaggattcctttttcagcaggggcatccggcaaatcaagctctttcgctgagcagatcatcccgcttgacggaacgccgcgaagctctgcatccttaatgacaagtccgctaggcatcacagcaccgactttggcaacgacaactttttggccttggtcaacgttaggcgcgccgcagacgatctgaagcgtttcttctcctacgttgactttacatacgcttaatttatccgcattcggatgtttttcttttgattctacataccccacaacaaacttcggagataaatcaacgactaatgtttcttcaacgccgtttctgtttaaaatctcattcacatcttgcacgaatgtttctgagagcgcaacagggccgttttcatcaatagtcaagtaagaagacgcgttgaaaatgttgaagcccgttgtttcttttgtttcgttattgaaaattttgacgacgtcgccgtgtttttcatagcctaattgttcgcgtgtcacatcttgaagagagatcaggagcgtgtctcccacaccttctttattataaaaagcgttcataagtaaaaatcctttctaatcctttttcggacggcttttcgccaggataaacaccggttccagctttccttcattgtacaaaaatgaaagggcggtaatcgggacggtgccgcctgcaaagaagctcatcgacatttgtcctagaatatcataccccgattcattccggatgtcagcaagaatcaaaacgtcctgatgaggaacagagatcgccagctccccttctgcatgctgcttatactcatttaagatcgcttcgttcaaaatccggcttgcgtcgtatccgtcgtttgccctgaagaaataaaagtaattgccggcaaccgtatcttctttgacaaccgtcggcagggaacggagattaaatgcggccgtctctctgatccgctcttttgtccagttttctttctcaagcatgcgctggtcaattaaacggtaggttttcccgagatcaagcgcgtaataaattcttgtctctgcggtatgatcgtcataaatgagcgggatatcttcactggacttgtccgggaaggaagtcgagcggatgaccggataaatgcgagtttctttcccggtcatttcctgagccttcccttccattgccgtcatcgcttcagagacatagtacacgatctcatcaatggcttcgtcttttttcagttcccattttgcaataatcggcggcaaatcgagtgtaatcccttttttagtcgtttgatcctcaacacggagggtgtctttttctctgtcaaacagaaaggagcgattctcgtgctgaaggcgctgtttcagtatatctgacagcttccttgaggtcattttcaaaccgatgtcctcctttacgctttagcgagagagtctgttaaaaactgttcaatttcttcttttgttttgcggtctttgctcacaaaacgatttacttcttttccttcattaaacaccacaaagcttgggattccgtaaatttcccactctgcacatgtatcaatgaatttgtcacggtctacgtagtagtaggtgaattcagggaaattcgcttccaattcaggcaggaaaggctctacaaaacggcaatccgggcaccaatcggctgaaaacataaatacagaccaatcatcctttaccgctttttccagctcttgagttgattcaatttttttcatttcatatccctccagttgtttatgttcttacatgttttttatcgatactcgtccatttggatcataccaaactgcttgaggcaaaaccacttatatgcaacgaatgaatatgtaagattggctttcccattatcattatcatattttatttgcattatcaagctcgtttcgtttaacatcgtgtacatgagggtaaaatttacagatggacatacataaggagggatttttatatggagtttatcgtctatttagcaggagaaatccacagcaattggcgcgaggaaattaaagaaaaaacaaaatcactgaagctccctattacgtttgttggcccgatggagaatcatgaccgctcagacaatattggtgaagaaattatgggcgtacagccaaatgccgttttaaaggatgacaaagcctctgacatcaacaacttcagaaccgccgtcctgatgaataaagcagactttgtgatcgccctgtttggcgaaaagtacaaacagtggaacacggcaatggatgcatcatatgcgatcgcaaaaggaaaacccctgattatcatccggccagaatcgctccaccatcctttaaaagagctttccaataaagcgaatattacggttgaaaccgttaaccaagctattaaggccctttcctatctatttgaaacagaataagaaaaaagcttgtcgatccgggcttactgctcgttcaacaagcttttatgaaacctacatattttctttaatcgcatccaccgtctgcttatcgcaggctgttacaagtttgatgagcatttctttagcagcagcataatcatcaatatgaatgatagaagcgtttgtatgaatatagcgggaacatattccgataaccgctgacggcacaccgctgttcgaaatatgaaccttgcctgcgtctgttcccccgccggatacaaaatattgatatggaatatcatgcgtttcagccatatcaagaacgaattccctcattccgcgatgcatgactgtcgttctgtcaagaatgcgcagcaaaaagccttttccaagctggccgaattcatttttgtctccgctcatatcgtttgccgggctggcgtcaagggcgaaaaacaagtccggtttaatcatatgagaagccgtctgcgcgccccttagccctacttcttcctgaaccgttgcacccgcatagagtgtattcggaagctctttaccgtgtaattccttcagaagttcaatgcttaagccgcatccatatctgttatcccatgcttttgataaaattttcttttcattcgccatcgtcgtaaacggacaaacaggcacgatctgctgtcccggtttaatgccgattttgatggcgtcttccttatcatccgctccaatgtcgatcatcatgttcttgatatccatcggacggtttcgctgcgcatctgtcaataaatgcggcggtatgcttgaaatcacacccggaaccggcccgttatctgtttgaatttcaacccgctgcgcaagcaaaacctggctccaccagcctccgagcgtctggaatctgagcagcccgttgtctgtaatggatgtcaccatgaagccgacttcgtccatgtgcccggctaccataattctcggtgcgtcctctgcgcctcgtctgactccgaaaacacttcccagtctgtcctgaacgatgtcatcggcatatttggctagctcctgcttcataaaagcacgaacctgatgctcattgcccggcgcgccgggaagctgcgtcagtgtttggaaaagcgctttcgtttcttgattcatgttttcccctcatttctatgtagtccttttattttattagaaacaatgaagttttccaagcaccctgacccaatctgctcgatcagccgcgtattgcttaacaggatttggctgtttctgtataatgaaaagtacgatcaaccaggaggtgctttattttgaaattgcgtcatcttcttttaggagcaggacttggaatttgtacggctgtcgttgtgaaacaatatgtgatgaagccttatatttcttcagaaaaagcgcttcgaattgtaaagtctgcttttaagcagcggggcccgattgacggatcatggatttacacccagccggagccttacaatattaacggagaaacggtacaggtatacaaaaccggcattacacgatcagctttcggagaattagaacagtatgaagtcatggtggatgcgaaaacgggagaaattgttgatgtcattgatacaatcgcctcttaacaccggacaagcaaaaaatagaagccgctgcctacgcagcggctcttttttattatatcgcgcgaatcggtttgtataccggataccacatcgcatcctgcactgcctgtataatgtcttcaggctcttccgtagcgacgccttccttcattgcggtttttgcaacttcaacagcaacggttgccgaaacagtgcgcaaatcttcaacttttggaagcatcggcgcgccaggcaccccgacattgaccatacctgcgattgcccgggcacatgcttcaaacatgccgtcggtaattaattttgatttggtaacaatcgttccaagaccgagaccagggaagacaagcgcgttgtttgcctgcccgatatgatacgtaactccgttatattcaactggcgggaacgggcttcctgtcgtgatcagcgcacggccttctgtccattcgattaaatcctccggttttgcttcagaaagagttgtcggatttgacattggcaaaatcgccggccgtttcacatgtgacgccatttcttttacaatttcttcagtgaaagcgccggaaaccgtagatgtgccgatcaggatcgtgggtttcgcctgccggaccacttcaagaagatcaatgcctccgccgtctccgttccgctgataatccttcacttcttcagccgaacgagcatacggcttttggaaatcaagaagctgatccatatcatctgttaacagcccgtttctgtctatgcaccagaagcgcttgtatgattcttcttcactcagtccctcgcgcaccaatgcttcccgcagctgttcggcaattccgattcctgccgttcccgctccgaatataacaactctgtgatccctcagcggaactttagacgcttttgcacaggataagactgcggccaaagaaacagcgccagttccttggatatcatcattgaaggtacacactttatctttatagcgtttcaaaatgcttcgcgcgtttttcgccccgaaatcctcccaatgcagcaatgcattcggaaatgtttctctcgccagcgcaacgtagtcgtcaataaattggtcatagcgttcgccgcgcactctggaatgctggttgccgacataaagcgggtcgttcaagaggctctcctgatttgtccccgcatctaaaacaactgccagcactctgctcggatcaatgcccgcagccgctgtataaaccgccagcttgccaatagaaatcgcgattcctccgacgccccagtcaccgattcctaaaattccttccgcatcagtggcaacaattaaatcgatcgtatcgctttgatctttatactgtttaaatgcttctttcataccgtccgggtcatcgattgacagatagagccctcgtggttttctgtattcatggctgtatctctggattgccgttccaactgtcggtgtatagacaatcgggagcatttcccctaaatggtcatttaacaggcggtaaaacagcgtttcattccgatcgtgcagcgccgttaaatagacatttttgctcaaatcgtcaggctgtgcggaatattgttcatacgctcttttcgcctgatcatcaattgttaataccttgggcggcagaaagccttttaaaccaagttcttttctttcttcctcagtaaaagcaacacctttgttcaaaaaaggaacagagagcacttcaaggcctcttaatgttgtttgaatgtctccttcgtttgttactctgaattgtttcaccctgcctcttcctttctgagcataattagtactaggtttgcattattagccggaaaacatgcagggtaaacataaaaatatgctatcgcttcattcgcttaactgactttttgatacttccgtcctcctcccattgaagggcgcgatactcggcatcatggtaaaaaataaaccaagcatctttttctgctgcgaacgcctgccatttctgcttttgcgggatagaggtcatcggataatcatcgtaagccagcacccatagcggattgcggtgggcatgtgtcggcatcagatctgccatatgtacggcagtttcacccgcatcctcgcatatcaggacactgtgtccgtcgctatggcctccggtgtgatgcattgtaataccctctgtgatcgttaaggtgtcttcaaaggttttgacttggccagctacagcctcccaattttctttccaatacgtatttttcgacctgatattcggatggcgcatttcgtcccattcaacagctgatgtataaatcactgcattcggaaagacagagacgagccgttcaccttcatattccgttaaaccgcatgcatgatcaaaatgaaggtgtgtcattgcgatcacatctatatcggcaaccgttaatccgagtgcagctaatgagggtttcacattcgactcttgtgtcacgccatagtttcgtttttgtttatcagtcagcttgccgtacccaattccggcgtcaacgatgatattgagcccatccttttgaatcaaaatagggtctgtccttagttcaatctggtttttttcattgactggatattttttagaccaaagcggctttggaacgacgccgaacatggcacctccgtccatatgcgtcacgcccccgtcaagccaggtcaacgtgatattaccaattttcattgtttccattttcatcccccctgtcatcatggtagcaaacggcccataaaaaaaacagactcctgtcagagtctgtctttacgttctccattcaacctcagcccgatagatcggctggccgagtgcagagaatttttcttcatattctgtcataatattgccttccagattgctgttatgcaaatcgaggctgacgtatgtcagcagcaggccgtactcagagaagctcttcaaagagtactcaaataaacctcggttgtccgttttaaaatgaatcgatccgcctttgcccattacttcttcatattttttgaggaagtgggaatatgtcaagcggcgtttttcatgccgtttcttcggccaaggatcagaaaagttcaagtagacccgtttcacttcccccggctcaaacacatccgtcagcgtgtccgcatctatattcagaagctttacattctgcgcttcgctgtcttttactttttggacggctgtcacgatgacgcttttaaataactcaataccaatataattgatgtcgggattttgtttggccataccagaaataaattggccttttcctgtaccaacctcgatatggatcggattgtcgttgccaaacactgtgttccatttccctttataatcagcaggattgctgatggcaatatctgcgttttcagccaaaaagtcatcagcccaaggcttgtggcgcattctcatatgattgacacctctatctattatttcgactaacaacataccatgaattaaaaagacccgcaagctcgtttttccagtgtatctctcttaaggccgagcgcataaaaaaagagggtcccgtctgctggaacactcctttcacatgtataaaaacgctctgttttgaacaatttaacccgtatgatactgaagggatgtgtaccgttatgggtttacattatgagcatcaagttcatttattgaaggatatcttgactgaccatcaattggactgctgcggaacagtcgcagagtacgagcagcttgagcgtgtgattaaatcactgatggcaaacaccgagcttgattcaaatttcaaaaacgtgcttgaagatgtttaccgctacagccaatcaggaatatcgtccaaatccattgactcacacatacaagagcatcagaacagcctgtctcaatgggtagagcaaatggattcgtattcctgattaatcaacaattcgtttcatgaggatatgcagctcttccattgcatcatgaaattccttatcattgccttttgctttatgccaggcaatgaaagtaattgtttcagataacacataccaagccattcgcaaccgaaggctttctgtcagctctatgccgtacatgctcagccagctctcccaagctggcttttcgacgtagtggtacagcaaaggcccgaggtccatcgccggatcagcgatcatggcgccgtcccagtcaattaaatacagctggttgtcttcagacaatagccagttattatgattgacatcacaatggcaaacgactttctcaccgaaatgcacttcatgcaggtgttcttccaaatacttgatcccttcttgaatcagcggcgaagattgctgcacagcaaatacagcctgcttcagctgagacaaaagagcccccgggttcagcggttcttttccaagtctcttcagcatgtccagcaaggcttttgatgtgtgtattttacgaagcaattcagcaacgggccgtccgctcatgtctttaggcttcagctctctgccggtcatccagtgctgggccgtaatgacgtccccattttccatccgttttgtccaaaccagcttcggaacaatgccttcggcggataaaacagctaaaaaaggtgagctattacgttttaaaaaaagctgctgcccgttatgtttcgcataatatgcatctcctgtagctcctccggcggggaagatctcccaatcgctacctagtaattgtcccaaccagttcatatcaatgttcaacccatcatttcttaaaatattttagaattaaggctaatcgtttctagtctatccagcgaatgcctttttcgtacgaatcgtataaaaataaaaaagacagctattgagagtctcatatgctaatcaatagccgtcctttaaattttagcgctatagcacaaacttcgtcaagcaaaactcttaagatctgatgctaaatataagataaccgttccgatgccgtttactgcaaccgttttcttgatttctgccgggtcttcctgaaatcctgatggatcacataaaagccgataaggtatgtcgtttggcagcctccactcgacggagtctggactcgcgtgatggataacaatgatatctttccattcgtcaacctcgtcaagatcataaagcctgtatgcgataaggtgttcttttagcgtcaagcattcaagatggcgccggatgtctgcagcggacctaagacggaatgcaggatgcgcttttctcagcgagatcagcctgcggatatagtgaacatcttctttgaatgtttcgcggcgatcccagtcgagctggttgatgctgtcactggattgatagctgttttccactccctgcttcgtccggaaaaattcctgaccgctgtgaataaacggcaccccttgggcaagcaaaataatcgcggctgcaagcctttgcctgcttcgctttcggctgtcattttcttgaggaagcgcgaagctcattttatcccaaaaggtgtgattgtcgtgtgattcgacataattgatggactggcttggttccggaacaatcggtgctaatgccttccatccggaagacccggcaattccatgcatcacagcttgtgctgattcactgctgccgagcgcaaaccctgctgccttaaggtgaaaggtgttcccttttacagcgtcacgaaacatatcattaaaaaagccgatgcccggcattcttggcgcgttcgccaaagcagctttctgttcatgcggcagcggtgtagccagatcccacccttctccaaaaagcaggattccgggctttgccttagttgctttctctttcatataaagcacggtgtcaatatctaaaatcccgaggagatcaaagcggaagccgtcaacgttgtattcttcaagccaatagaccacgcaatccgcaatgaactttcttgccatccttctttctgatgcgatatcattgccaacgccggtgccgtttgatggcatcccacattcgtcgtgccggaaaaaataacctggcactgtcttttcaaagggggaattctccctcttatacacatggttaaaaacaacatccagaatgactcgcagaccgtgctgatgcagggtattgatcatttgtttcagctctgtttttctcgtttgaggatcatgagggtttgaggcatagcttccctccggggcaaagaaatgaagcgggttatatccccaattgtatgcatcaagcggcttctcttcatcaactccggcaaaatcgttcaccggctgcaactctacatgagtaacaccgagctcttttatatacgccagtcccgaagaactgccgtttgcggtttgtgtatccgtttccgtcagcgctaagtattttcccttgtttatcatgccgctgttttcatggatggagaagtcgcgaaggtgcgtctcatagatgacggcatccacagggtgtgagaatggtttaagaggagcagtccatttcatttgatccgggcgcaagacgacgcccttctctccatttacagtcacagccttggcatacgggtcaactgtttccatccattctaaattgttgcagatgcaaaacaaatactcatacccgtgaaggtcacccgtgaccgtaacagcatagacacccttttccaagcgattcatttggaatgtgcgcccgcttttattggggtgtgaaagcttgacagcagctgaggttgcagcaggcgcccatactttaaatacggtatgatccgcggtataaacggcgcccagctctccgtcataataaaattcgtcatcaaacgcagccgtccggatgaccgcgccaatttggagatccgttttgtggccgctggatgctctgacgcaatggatttttccaaatgtcacaggatggtcggatacgcagacgtacttgtattttgcttcaagggagtattcctccctgacagccagaggaaaaactgttgtttctgtctcaagccgaaacggcggtgtcatgatttccttttgttcagcaggaatcagaacagtaatgatattcatatcatcgacatacgcttcgaagctgcggcggatgctgaccatcggaagctctctcctccaaacacgtttatgttttgatccttaggggtgaaggactagatgccagacgaaacggggtagtgcccatgatttctccgtcagcatggaacgggattttgtccttcgtgtaaaatgtaatgtccttcgctttaaacatcgtaacgccatccatctttgtatgttttccaaatgccatgagacataaaagccaatattttttcaaaaacggctggttttcaacgattacgatatcaaatgtcttctcgcgcggatttgctaggggcgccgccttcatgcctcccccgtaaaacggatggttggatacaacggcaaaccagacatcatgaaattcgcgcgtctcgtcttccgtcgtacaagctaacgtaaacggcttaaaggttgccgaagcgtgcaaatgagaaagcggatacacaagaaatcgaaggcggagaaaaagaaaaacccgtctcaacggaaattccatcgcctttttattgacatatgcgtcaaacccgatcccgatgtgattcataaaataaagaatctgtgatttatcctgaaggaaattgacgctccctaaatgaaaggttcttgttaacgggcgctttaccttcttgatttcctgtatcagatcgatttttttaatagagaaccctcgcgaaaaatcattatacgcgcccgccggcacaaagctcagctcaatatcgtcaacatctttcagcccgttgacaacttcatgcatggttccgtctccgccaatgacgatcaggcgcttcagcttatattcctgtatcgttgaaatctgtctggcgagcacctcggcgtgtcccggatgttcagttaaaaatgaacggtgctcaacctttcgtttgatcaattctttttgaatggacttccaaacacgcaggccgtttcgatgtcctgctgtcggattaataataaaaaaccaatggctcatctttctcacctgcttatgttatgagaaaaccgctcaaatcgttctcttttactccagccactcctgtctgcgataggagtcagacatgcagtaagacaatagagcctttgcagcctttacctgatgatgtttgatcggagcagtgtttttcttctgccgctcaatccattcttccgcgctccgcttatccgctatttctaagccgtatggcggctccgggtaatcgatgtacgacgttctgctcagaagcaattttcgaaccggaatctcagcctgtttttcctttacgatctttgacacaaccgagtccgtacgaaacaggctaagccctggatttaacactgatgcagtctgagaggctgttttcttgtcccaaaaacgatttttagaccctatgtagacactgtcttcctcagcctctaaaaaagaaacgcaataaatttccagaggagaaataatcacaatgcttaattcaaccgccgcctgctgaattttcagcacaggcttatacataataaaataagaatcaggcagctgctgggtcagataacgcaaaatgcggtcctgcttcacttggtttgagagttgagatatttctgaaagagtagagcttgcccatttgagctgaaaatcatataaatgccttttataaaaagaagcaagcgccaccctgctcttcgggagccttacatgaatatcttcttcgtcctcaaaccattggtgtctctcttcttgtatatcggcttttatctcttcttttcttcttttcaatgaaaatttttttcgtttctgcaccggttccggttcttcagcactggcttgcctttcttcatgctggcgctccgctgcttctactagtgaaagccagcgctcttttttcaaacgtacaaactggttgatataatggtacggatcaagctcatatctcgatatataatcatgaattttgatgatttgtgccatgtttgtttctccactccgcaatgaattaagataattgaaatttgaatatttcctcgtattttggtgattggttcaagtgtatttgaaagagcgaaaatcgttcagccatcatcgaaacctcgccgctttcaaacggaacatgagctggaaatccattttcgcctgtccattttcttgccagcgtcatatgaggatgatacggtcttttttccacttgaaagccggcctgaaggacagcctgcttcgtatgttcccgcagtctatcaagcgttttgtttttctttggctccagatgtaaaacgcgcggccttctgcggtcgccgaatacatctatcttgtcaaactcaattgaaaatgggtcaatttctgaagcaatctctgctagcgaaccttcaagcttctttatttgtgtctcatccgccgctccgagaaaaattaacgtgatatgatagtcaagcgggtgcacccatttttgaaacgtcaataccggttcgtttttcgcagcctggtagatcggatttgcaattccctcaggtatgggaacgccgatgaaataatgaggccgtatatctggcatccgtctgacactcccttctttgacagctattattttatcaataaagaggctgtgcggatagaggaacagtgtatgaaaacactctcgcacaaacgtttattatgttaggatattatatgacacttgttttattcagaaaggaatgacaatgttgaaaatcgttgcaaacacagctgatctgataggagatacaccgctagtgagattgaatcggcttcagccggaaaatgcggcacaagtctatttaaagcttgaatttttcaatccgagcggcagtgtgaaagacagagccgcttatcaaatgatcatagaagctgaacaaaacggtttactcaagccgggatcagttattatagagccgacaagcggaaataccggcatcgggctcgccatgaatgcggcagcacgcggatataaagcaatcttagtgatgcctgatacgatgacgaaggaacggatcaacctgcttaaagcttacggcgcagaggttgtattaactcccggagaggaaagaatgccgggcagcatcaaaaaagcgaaggagcttgccgaacaaattccgaacagctatattccaatgcagttcgataacactgccaatcctgatgcgcaccggaaaacaacagcgcctgaaatcgcccgggcaatagaggaaatcggaaaaccgctcggcgcttttgtcgcctcctctggaacgggcggaaccattaccggaacaggtgaggcgctcaaagagctttttccggatatcacggttcatgttgttgagccagcgggttcgcctgtattatccggcggaaaacctggcgcgcataaacttgtaggaacgagcccaggctttataccgccgattttaaatgaggacgtttatgatgaaattatcaaaatctctgatgaagacgcgtatacgacgacaagacggcttgctgctgaagaaggaattcttgtcggtccttcatcaggcgctgcctgcttcgcggcaatcgaaacagcgaaacgcctctctcctgacaaagttgtggtctgcatgacagctgatacaggagaacggtacttatcaactgatttatggtcatttatttaaaaaaaggactggcttcagcagaagccggtccttttattttgcaagctcgtaaatggcctgagcatataacgctgtcgatctcagcaggtcatcaatttcgatatattcatccttttggtgtgcgctgtcagggcgtccggggaacagcgggccgaacgcgacaccggcttttaaggatctcgcatatgtccccccgccgattgagattaagtcagcttttttacccagctggccttcataaaccttttgcagggttttgactaacggatgatctgcggacacgtgatgcggcttgctgtctttgaattctcccagatcaaattcagatgcactttcgaatgcatcgcgaatcgctttgctttctgctgtcacaggatagcggatattgatcccgagctcgcctccttgcccttctttatagcgcagtgtgccgacatttaatgtcagctcaccgctgatttcatcctcacagtcgatgtccagtttttttcctcttgtatcacctgagaacttatctgtcacaacttgcacaaaccgctttcctgcatcgtcaagctcagtctgctggagaaattcgcacaataaaatgccggcattgatcccattgttcggttccatcgcatggcaggaaagaccgtacatacgcaaaatgagctgaccgttctctattgcagcttcccctttttggtccgtcgtgcggagcatgtctttaaatgaagacagaatctcttcttttttcggcccttcaatgacagcttccgcagcgtcgggcaccatgtttaagcgaaggcctgattgaaacgagacaagcactgcctttggttctgcttgatttgggcggtgcggtataagtaaagaagcatcgatgatccctttttccgcattaatgattggaaaatcggcgtcaggcgcaaagcccattgttggcatttcttcatgcttgaaataatgctctacgcatctccaatcactttcttcatctgttccgataatcattctgactcgcttggacaggggcaaattcatgtctttcacgattttcagcgcgtagaatgccgccattgtcgggcctttgtcatcaatggcgccccttgcataaatccgtccgttgcggatttcagctgaaaatggatcactcgtccatccatctcccggcggcacgacgtcaacatggcaaagtacgccgataatgtcatcgccctccccccattcaatatgacctgcgaagccgtcaagattttttgttgtaaagccttctttttctccaagctccagcaatgaagtcaggctggcatttaccccttctccaaacggtttaccgggtccggcggttgtttcgtccatgacactgttgattctcaaaaattcctgcgtatcacgaattaaatcctctttttttctgatcacttcaacttcccagttcataatgatcccctttccgcaagaaatgacttgcaaaaaccaaataaaacgaataatattaatggtgttttgttaaaacgttcgtaattggaggatactatgtttcatctaaaagagcagcaaacatccataaagcaagaaatcatagcagggctgacgacctttttcacaatggtctatatcgtcgtggtcaatccggtcattctggctaacgccggggttcctttcgaccaggtgttcaccgcaacgattattgcctccattgtcggaacgctgtggatggccctggcagcaaattatccgattgctattgcgcccggcatgggcttgaacgcttatttagcctttcatgtggtaagcgcaagcgatggcggcatcacgtacgcaacagctttcagcgcagtatttacagcaggggttctcttcattattctatcgttaacgcctttaagaaaacaacttatagaagcgattccaaacaatttaaaatacggaatcacaactgggatcgggctgtttattgcttttatcggtttgcgtcaagcgggcattgtggcagctgatgagtcaaacctggtcactctcggcaatctgcattcacctggtgttattttaacgctggtcggccttttgatcagcgtggtcctgatggtgctgaatgtaagcggcgctttatttatcggaatggcagctaccgctttgatcgcctttttcaccggtcagctccattttccaaagggatttatgtcgcttcctcatttgccggaaggattgatgatctcaaatccatttatcgcttttggcgatgtcattcatcacggcctgtacgctgtcgtcttttcttttctattagtcaccatttttgatacgacaggcacgatgatcggagttgccgagcaagccgggctgatgaaaaacaacaagctgccaaacgtgcgaaaagcgctgcttgctgattcaaccgcgacaacagtaggagctgttttcggcacaagtccaacgactgcatttatcgagtcttccgccggtgtcgcagctggaggaagaacggggcttacggctttgactgtcgcggtgatgtttgcggcttcaatgtttttcagtccgcttgtcagcgccttgtccggtatagccgccatcacctcgcctgctttgattatcgtcggcagcctgatgatgggttcagtttccaatatgaactggaaagagatggacgaggcatttccagcgtttctcgtcattctggccatgcctttgacatccagcatttctacaggaattgcgcttggctttatttcatatccgatcgtaaaagcggcgcggggaaaatggagagagattcatccgctcgtcatcgttttcgccattctgtttttcatccagctgtttattttataacatagaccaaaaaacccaaacgtcgccgtttgggttttttatgtaaacaataaagagacagcggccgctaaaaaacaacaggcggcaaacgcatagtgcaggatattgatacagctttttctggcccgataatattcatcactttccttatcggcgccaattaaaaaaggggcatccatgaccttgtcaaaaataagcgtcaggatataacggcaaacccctgtgtatactagcagcgcaatcaccttcagccaaattggggaaacaaatatgagaacagtgaaagctgacaatagcatgtacatctgcctcgcatactcgccattcctcagcatgactttaaaaaacaattccttatagcctgtgcagatcgttcgtcttttaaatatcctttttgaattacggtataataacggttttcttctcatcctgtcttttacttttggcattcccgcctcctgactcatcatcatcacaagtcctgcaagagcaagcctgctttttttctcttcagtcacctcagcttcaaaagccgtgaacgaagccgtctttttcaaactgcggataactgagaaaagcaaaaataaaatgccaaaaagcgcaagcaagtgccactgagtcaaaacaatcaggatagcagaaccagcaaaaaatatagctctgacaaaaatatcgccaatccatctcgaaatggagcgcggctttctgatcctgtcttgctttaaggataaaaagaatatatgaaggccaaacaaataagacaatagagcagtgctttctgcgaatgtgatgtgaacagaatgactgataaggggaaggacaataaaaaagagaagcagccatttagccagcgtgaccagaaaagaatacaaaagcgcgtaccgtttgagctgatagatgatttccttcttttgcagcaaaaacactttgtccgcttccattaaaaatgtacgaatcgagcctgtaaacatgatcagcccacacacagcgtacagccatctccactccgccacttcagaccactcataaagaaggcctcttccattcatcaaatcaatatactgatagatgacaaaagcaatcgccggcaaaacgatgtagagagcgactgtccagtcaatgaccgcatgcaacactttaaactgatacttgtaatagtcaaacagccttcgaaaaaagagcgtacgcccgttcatggccgatcaccttgaactgccttataaaaacagtcaagcaatgactgcccctctaatccggtcttgtcctgaatatcttttaacgtgccttggagaaataatgaacctttctcaatcatataaaaccggtcacagattttttccgcggtatcgagtacatgcgtgcacataagaattccggctccacgttctttttcagccttaagcatgtccacaaagcgtttcgtcgatatcggatcaaggccgataaacggttcatcaatcacatacatatccggcttagagagaaaggcctggataagcattagtttttgctgcatgcccttcgaaaaggtgacaggcagctcatgtttgacatgatcaagcgaaaacgtctgcagcaggctttgggcccgatgcgcaaattctctctcttcaatgccgtggagtgtgctgatcagatccaaatgctcccacagcgtcagttcttcgtaaaaggacggatgctccggaatatatgcaaatgaacagtcgttccaggcaatatgccctttaaaatcttctgaaaggccgagtatcgccttgattgcggtgctttttccggcgccgttagctccgatcagtccaaccagctccccttttctgacttccagaaaaacatcggtgagcactttttttcggcttgtatacccggcctgttctattgaagcttcaagcaaatttgtcaaaactcacccacctccaaaatttactacgaaacagaataaaaaaagtttctttaaccataataatattgagccgaaatacatagtaatccaacaaggatggctgcccaacgcgaattggaaaaaattaataggagttatccctagattcatcactgcaatatcgtgtataatgagggcgaattattttaacagttacagatgtctgcctttgttgctatttcgtacgcagttgatagtcgtgagttgtggttagtcaagtccatccgatcttatgatagggagtggttttttgaaaccttcaacaaaccgtatgctaactcgaatcaaatcagtttacatgtttatccaagaaaaaggtcttgtgacaacacaggaactggttgacgaattcggcattacacctagaacgattcaaagagacttaaatgtgttggcatataatgatcttgttcatagtccaagccgtggcaagtgggagacaacgagaaagaaagtaaagattacctcataaattgaaaaattacatagggccgcctgagagcggtccgatagataatagggcgaagaaactactgagccttgtttttgtgtgcttataaataaaaccccgcattcggtatgcggggtttttgtcatgcttgcggctcattgagcaaatgaagctcttcctctgtcagctcacggtattctccgggtgccagagcgggatctagggaaacgcgtcccatcgaaagccgcttcagataaaccacttcattgccgacagcctttgccatttgcttgacctgatggtattttccttctgtaattgtcaggtatatcacggtattgccactgtcgtttgttttgatttccgcttttgccagctttgttttatagccgccctctatgtagacacccgtttccaaatcggagatgtcttcccgagaaatctgtgattttaaatggacttcatacgtttttggaacatgctttttaggagaaaggagccgatgtgcgagctgcccgtcatttgtgagcagcaaaaagccctctgtatctttatcaagcctgccggctggaaatggctcaaatctcatctcctccggcgtcagcagatcgaccactgtttgctgccggctgtcctcagtcgccgacagcacgccctgcggtttattcatcataagataaatgaactctcgataatcaaccggttccccgtatacggtcacctcctgcgtatcaggatcaacgtgcgcctttacatctttggcaggtttgccgtcgatcatcacggctccagccttcacaacggctttgacttcttttctggaaccatacccgctgttggcaagcagcttatcaagtctcattcccaatctctcctttataaaagaaagcccgcagcatgcgagccctcagtttcatcatatctagttcatcagcctgcatgtctgcctttctttaagaaacctggcaaacggcggcctaaaattttctgtaaaaatcctaatcggtagccacaatacaggtagacagctccgccaacagcggccgcgatcaccacaacaatcgcagcttgcagctggccatcctgataggaaataaagaagcctaatacccactgcacgattttcacggcaatacccataatggctgataagacaagcatcaaaacagttcgtttaactagtatcttatacgaatagcctgcatggcgcttaatcatgataaacccatataaaagggaagcgatatatccaagcgccgtcgctaaaatcgctccgtcagcctgcatcagcttgatcagcggaacattcagcacaagcttgatcacgacgccgatcacaaggctgacaaccgcaaatttttgcttattgatgccctgcagaatggctgcgttgactgtaaacaaagagaacagaattgcgactggcgaataccatagcaaaatgtttgcccccagttcagggtgaaggctctctgacccgtaaaagaacgtatacgtcggtcctgacaatagagagatcccaacaacagccggaataattaaaaacaggatcgtctgcatcgtttgattaatctgctgatttaacagcttatagtttccgcttgtaaacgattcagtaatcgttggaattaatgtcagtccgaaagcagttgctagggaaaccgggatcatcacgagcttctgaacatacagggttagaatcgcaagcatgtcttggctgatggcttgatgaccggcttcaatcatcgctttgttaaacgtatttgtatcaatatagttatacaaagggatagctagtccaacaaaaacgtacggagcagcatagctgaacagctcgaaaaacattttcttgtagcttaggtttgctgtcggacccgtattcggcatcatcgccagcaggctgcccttccgtttgttccaataaatataaagcacgaccagccctccgaaggcaccgatcagcgctgcgaaggttgcatagccgacagcgatgacaaggccgccgttgaaaaccttcaaaatcaagaatgtcgcactcaatagaaagatgatgcggacaatctgttcaacgacttgggaaacagctgtcggacccatcatttggtgcccttgaaagaatccgcggacaaggctcataatcggtacgaccaatagcgctaagcttaccatgcggatgacataaacgacatgatcaattgtcaggccgttattatccttgcctcccagcgatatttccgcaaacatcggagccgatagatacagaatgaaaaaggctatcattcctgtgacgagcataaccgacatgcccgccttgagcattttcctgcttgtctcataatccccttttgaattatatttggaaacaaatttagaaacagcggccggaaagcccatcgtagcaatattcaaaaataaagtgtattggttgtatccgtattgaaataatgcaccgcctgtcgccccgaccataatgctgaagggaattaaatagaccatccccagaatccgcgatatatatgtaccgagcgttaatacaaacgtgcctcttaacagtttgcttgacatgtttcttcatcaccattttctacgaagattcaacttttctattttaccacaactgggcatttagacggtaataaatacaaaagcaatcctgtgaacattcatgtccgcggcaaaagacgtttaaggagcggctttctttcgctataatagtactgcggacggggtgtccgcacacgaaatgaaaagaaagttgatgataaagatgaaacaatatgacgtaattgtaatcggcggaggcccttcaggcttgatggctgcgattgcagcaggagaacagggcgctggcgtgttgctgatagataaaggaaataaattaggacggaaactcgcgatttccgggggcggccgctgtaatgtgacgaaccgccttcctgtggaagaaattatcaagcacatccccggcaacgggcgttttttatacagcgcgttttctgaatttaataatgaagacattatcaagttttttgaaaacctcggcattcaattgaaggaagaggatcacggccggatgttccctgtgaccgacaaagcccaaagtgtcgtagacgcgctgttaaacaggctgaagcagctccgcgtaacaatcagaacgaacgagaaaattaaatctgttttatatgaagatggacaggcagcagggattgtgacgaataatggcgaaatgatccatagccaggcagtcattatcgctgtcggcggtaaaagcgtgcctcataccggaagcacgggagacggctatgaatgggctgaagccgcgggccataccataacagagctgtttccgacagaggttcccgtcacttctggcgaaccgttcattaagcaaaaaacactccagggcttatcactaagagatgtagccgttagtgtgttaaataaaaaaggcaaaccgattatcacacataaaatggacatgctgtttacccatttcggcctctcaggacctgccattctcagatgcagccaatttgtcgtaaaagagctgaaaaaacagcctcaagtgccgatcagaatcgacttgtatccggatatcaatgaagaaacgcttttccaaaagatgtataaagaactgaaggaagcaccgaaaaaaaccattaaaaacgtgctgaagccttggatgcaggagcgctatctcctattcctgctcgaaaaaaacggcatctctccgaacgtatcgttttctgagctgccgaaggatcctttcagacaatttgtaagggactgcaagcagtttactgtcctcgcaaatggcacactgtcgcttgataaggcatttgtcacgggaggcggggtatctgtaaaagaaattgacccgaaaaaaatggcttctaaaaaaatggaggggctttatttttgcggtgaaattctggatatccacggctacacaggcggatacaacattacctccgcccttgtcacaggcaggcttgcagggctaaatgccgggcaatacgcccgttcttaatcattactctttaaatctcttgccgccaaactcacatttgaacattccccgcattcatgttagggtgagacttgttttgtttcacctgattgcggggtaattttaagagaggaatgagctgccatcgtacgaccatactaagcctgcgagcaagatataggcgtacacaaaaaattagagggtgagaaatgttgaaacatatatctagtgtattttggattgtgattgcaatcacagctgcagctgtattatggggtgttatttctcctgacagcctgcaaaatgtgtctcaatcggcacaagcatttattaccgattcatttggttggtattatcttttagttgtctctttgtttgtcgggttttgtctctttttgattttcagcccgatcggaaaaatcaaactcggaaagcctgatgaaaaaccggaattcgggttattatcatggtttgccatgctgttcagcgcaggcatgggaatcggcttagtattctacggtgcggctgaaccgatcagccattacgcaattagctctccatcaggtgaaacagaaaccccccaagccttcagagatgcactccgctatacgtttttccactggggtttgcacgcttgggccatttatgccattgtggcattatgcattgcctatttccaattccgcaaaggcgcacccgggttaatcagcagcacactgtcaccgattctcggggataaagtaaacggaccgatcggaaaggccattgactgtattgcagttttcgccactgttgtcggggtgtcaacaagtcttggtcttggcgcaacccaaattaacggcggtttgaattacctgttcggcattccgaatgcgtttatcgtccaattggttttaatcattattgtgacagtgctctttttactttctgcgtggagcggactcggaaaaggaattaagtatttaagcaacacaaacatggtattggccggattgttaatgttgtttatgctcgttgtcgggcctacagtgctgatcatgaactcatttacagattctatcggacaatacattcaaaatatcgttcaaatgagcttcagactgacaccgaacgatcctgaaaaacgcgaatggattaacagctggacgattttctattgggcatggtggatttcctggtctccatttgtcggcattttcatcgcccgtgtatccagaggccggacgatccgagaatttttaattggcgtcttggtgacaccttgtattttgacatttctatggttctccattttcggcgtatcagccatggatctccagcaaaaaggcacgttcaatgtagcaaagctgtccactgaaacgatgctgttcggaacacttgatcactatccgctgacaatggtgacatcgatccttgcattgattctgatcgcagtattctttatcacgtctgctgattcagctacattcgtgctgggcatgcagacgtcgtacggttctttaaatccggcgaattctgtgaaactcagctggggtatcattcagtccgccatggcggctgtgctcctatattccggagggcttgccgctttgcagaacacagcgattctggcagcgctgccgttttctatcgttatcctgctgatgattgcctctctctatcaatcgctctcaaaagaaagaagagagatcaaaaaagcggagaaactcgataaaccgagaagtcctagagtgaaaaaagcatattaacaaaaaagatctttccgcgcctgcggaaagatctttttatttgcgatataaaataagggcggaaaaacagtaaagctgctcgccgtctgggtcgcacgcggccgaaaccgtatatttgatatcaatcagctgctcctccgatatcccttttaaaaatgaattgatttccgtctgtaagtctttttcatgctcttcatcaaataccgctaccttcagcattttatccgctctcctttctctatcaatctattccgtttggaacagcgttatgatagagaaatgatgattatctcgtttccggataaaaagctttccgtatatgggattccctctgtggctcgccgccttgctgctccactttcagcagcacggcataaacaatgcgcatatgacagtagctgataaggctgacgctgaaaaaagggacaatgcccggcaggtacgcaagcaagaaaaaaagagcaacagtcagcgcaagcatagcaagcgtatattgcaaatacgccacactgagcaagagcgaaaatttcacatacagacgttttttccagtcaaaatggacaagcagcggaaacacataaaaaagcatggatacgaacaaaaagccaaatatcataatggcgaagcgcaggatgtgcagaaggaaatgacttggataaatgaaggccaaatcaatataaatgatcactccgatgagcgccagtacagcgccgagcagatttgaacgaaaaaattcacccttatattcctgccaaaacgttttgagcacgggaacgttgtcctgcccctgaatccacttccgcatgacagcgaataaagccgcggtcgcgggcatgatgccaaacacaccgagaccgagcaacgtaaaaaacagccacagcaagtttgtatacgcaaatctcatgatccattcgcaaaaacgcagcatccgtcccagtgagccatcatgttccatggcgccccctcctttttttgcattatacattctgcatctgaaaaagctctttcatgccgatcggcttcttttcggcaaccgagcgccacattccctcaccaaccgcgatggagtaggctccagcttcagccccggctaaaatatcatagcggcgcagcgggtcttttcctaaaaaaagatcctcaagcaaaagcggatcacctccgccatgccccccttcatttttgaccacttgtatcgtctgctttgattcaaaaagcggatagtattcgattgtctgctcaggaaaagcaaacggaattctggaaggttcgtgaaattcatttgattcaatacgcccttttgtgccgttgatcgtcagccggtagccttcatacggtgccgaaaaaataatcgagtagcttaacagtgcgccgccatcatatttgactgccgccacgtacgtatcctcgatgtcaatttcctcgtcaaaaatacacgcgtcaggcctgtatgcagtatataagctagactggtctcctgcttcgagatgatcatcttttatagaagctttagaggaacggggatgccaccttgaatagtagtggcatttttctttaacacggcacgtcccgcaaaaacgcccgtcttcttccggcaaggggttccactcactgtccggcccatagtaattcaaggcgccataagcaaatacctcttccggattttgcccgagccaccaattgacgagatcaaagtgatgtgttgatttatggacagaaaggcccccggaaaactgtctcgacctgttccagcgtttaaaatagctggcgccatgatacgtatcaatataccaatttaaatcaacggaggtgaccctgcctatttttccgtccagaatcatttcttttattttccgatgaaacgggctgtagcgatagttaaacgcgacggtgacttttccttcgcttttggcctccgcttcaagcacccgattcgcatcctgcactgttgtcaccattggtttttcagtaattacatctgtatcccactgaaggctttttacaatatatgtgacatgcgtatcgtccctgcctgccacaatgacgatatcaggctttgagacgcgcatcatctcgtcaaaagcatcttcgctaaactcaggcacgtgggccagctcgggaaatttctttttgcaaacggcaaaacgtttcggatcggcatccagcaatcccgtaatctcataatgagttgaaaaccgctccaacagcggtttgataaacatactgaatgctctgctgctcaatccgcaaaagacgatgttcttcaatatcctcacctctatcgggcttcagttagttgagaaatcagctgcagcgcttcctctgttttttcagcatacacagggataaacgccgccatatcgcgattcaatcgaaaagaatagccgttcagctgttttttccctttttcgatctgaacggcatagatcgttttttctcctgttttattattaacagttgtataaggagatgttttttcaggaggcaatccgtttaacggctgaaaattttccggatcattgtaagcttgaaacatgtcttcaggcacgatgaaaacatctccctcatgggcggtaatttcagtcagcagtttttcctgaaaagctggaaagatatcgaccttcccagcattctgctcggcggccttttttattttttcctgtacgccagcctgcatatcagaaaagagaatgacatgcattccgtccgtcctgcttgagcatgatgccaaaaagagcactgagacgatcacacacaaagccgtacgtatcctttttgtcatttccccgctgacctaaaaagaggctccagctctgtcatagctaaaataaacgcgccggctccgtgcagatcgtttttgcttctttcgcggctgacataatagtcatagaaaccggctgacgttccgacacatatgtctttgacgagaaacgcgccgtcttctgatgtttcggttttatgctgaatcaagccttgatacgcttttagcagtgttgtttcgtaagctctgtctaaatagcctttattgattcccttcgcaaatgcgtacatgtacaggcaggatcctgagctttccagccagttatcagacctgtctcccttatcaacgatctgataccataaccccgtctctttgtcttgatagcggcagatgctttccatcatgtcctgcagcgtgtttttccacccatgacggtttggatgcttcttcggcagctcttcaatcatgtcagcaagagacatgacgtaccagccgatggaacgtgcccaaaattccggtgaacagcctgtctcttcattggcccaaggcatttttttcgcttcatcccaggcgtgataaaagagtccgttttttgcatccttcgtatgctttctcatcaatgactcctgcagcacgacctgatcaaacagctccggctcctgcttcagattggcatatttcagtgcgaacggccccccatgtataagccgtcaagccacatttggtatggataaccgtctttgtgccaaaaaccgccctcagacgtccggttcagtgttccatataaaccgcgcagcctttttgccgctttggcataccgttcatccttcgtctgctcgtataatggaaaaagaatgagacccgcttgaatggcgtccagttcatctcttctaaataatagattgccataatcatcgattaagagatctgcataggccttcgcatactcaaaataccgcttttccccggttgcttcccacagccgcaatacaccgcataagaaaacaccctggtggtagtgccagcggtttgcaggaggcagctcctggactgtgtacgtattcataatggtttttgccaatgcctccgcgtacgtaagaggcgattttacagcgattgattgatccattgatcccatccctttcttaataaattccttcctcgccaaatttcttcgctaaacgattcgcaagcatgaccaaaatcagcccgaccgccgctttaaatacgccgactgctgtactgtagctgaattgtccctgtttcagccctgcagtataaacgtacgtatcaaaaatttccgccacttccctgtttgtcgcatttaacagcaaatacacatgctcgaagccaagctccagcgtgtctccgattttcaaaatcagcaaaacgacgataacgcttttaatggcgggcagcgtaatatgccacatttgccgcagccgtcccgctccgtccattttcgccgcttcatacagctgggggtcaaccgctgtaatggccgccagataaatgatcgtcgaccagcccgcttccctccagataacctgaagaatatacaggggccggaaccattcttcgttcagcagaaaattgattttttcaccgccaaaaaacacaatcagttcattaatcaagcctccgtctaccgttaaaagcacaaacgaaagcgatacaacaatgacccaagacataaaatgcgggatataaatcagcgtctgaacaaattttttaaagagagcaatccgcacttcgttcaatagaagcgccagcagtatcggcaccgggaaaaatatggccaggttcaaagcaaataacacgagcgtgttttttaacaagagaaaaaatgtaggctcagtaaacagcctgataaaatgcttcagccccacccactcactgcccaaaatgccgaggaacggctgataatcctgaaacgcaatcacaattccccacatcgggacatacttaaaaagcaaaaaataaatacaccccggcaaaatcatcaagtacaaatatttttgctgaatcagcttgattagtaagcgctttcttttttcttttttaaaaatgactgtatcaacagccggcgcttgcgcttctgctgttttcattttttcccatcctcctttcacgggttcttgcattcactgtagcgcagaggtaaaagtccgtctacaatcatatgatcacatcctgttttatccctttataatcaaaggttcaggaggtccacctgaaaaaaagacaccgatattagaaaatgattattgacaatatctatcaatctttggattaattgtattaaggtgaagtggatgttatgaaatggggggttttatgaaaagaagccaatacaagttttactacaaactgattacgtttttctgcctgctcagcaccattccggttattttggtcggattgttttcgtacgagcactctcagaaaacggctatatccaacgtttcagaggaaaaattcgacacactccagcagacccagcaaagcatcgagcatatattgaaaaccgtcgatcactctttaacccactatgtgagttcgccgcctctccttcgcacattgtccgagcctttgcactcagaccaatttcaaatctataaccaagtgaaccaagagctcaattatctgcaaagctttgataccgatctgtccaacatgacgttagtcagttatacgaaaaaatggtacatgaacaattccggtttgtaccgtttgaatacagacactcttcatgaagcagcctcagcgtacacgaaacaaaaagcgagccgctcctattggacgcttgaggaaaacaatcatttgatttcaaccaaagaaggcacagcagaaaactgccgctacaatatcaatttaattaagcagcttcctttgaacagcacaaatacaaagggattggccgccgcaagcatcccgagctgttcgcttgtcaaaaatatgcccggctattcaaacgccaacaacctgtttatcatcgatgaaaaaggcctcatcatccttcataacaatatgtctgacgttggtgaatctcttcataacgacggctttgtccaaaaagtgctggcgcaaacggccaatagcggacagtttgaaacagttattgaccggattcattataaagtcacctatcaaaaatctgactataatgcatggacttatttttctctcgtttccctgcctgagttaaaaaaagaagccaaatcaatcggctggatcacttttgcagtatgcctcattttgttaacgctttcattgctgttctcttggcttggctcccgccatttttacaagccgatcagggtgctttacgaatcattcgcaaggcatggtgccatacaagaaaaacagccgcctcaaaatgaatttgagttaattgaacagagctttaagcagctgaaggacagaaatgatgatcttgaagaaacgatgaagcagcaagccacccacctgcagcaatattttatggtcaggcttatgctcggaaaactgacggatgaggaggttaataaccgttttgaaagcctcggtttaaagcaaaattggcggcaccttgccctgcttgtgctccaaattgacacactgaatcatacgccttatgagaaaaaagatatggatctgcttttgtttgccgtcaacagcctgattgagcgcaacatcccgacggacaaacatcttgcccccgccgtagttgacaaacagcaggcgacgattttgatcaatcaaagcgggacaaaggaagaattcatggctgagctgaatgagactgcaaggatgattcaggaaaaagcggaagctgagctgcagctgtctgtcagcatcggcatcagccagccgtttgatgtgctgacaaaagcgaaaacagcctatgcggaaggctcagaagcgttgaaatatcggctgaaagcggaaaacaagtcgatcatcttttacgaagaccttgaccagaaaaaaaccttcaaaacccattttccaaagcagcttcagcatgagctgttcgatgctgtcaaagcaggagacaaggagaaagcggataaatgcctgcacgcgattttacaagccattttcacccagaacaccaacccgtatcaatttcaaatcgccatcgcccgttttttgaaccatgtgattgagctgatgcatgtgcttgggatcgaattgtttgagcttgaagaaaacaaaatgctgtatgaccaaatttttgagctgaaaacgttcgaggataccgaaaactggctaaagaatgagtttattgatccgatgacagacaaagtgaacgcccgcgcggatgcccagtacaaaaatatttccgacaacatcattcatatcatccatcatgagtttgaatccgaattgacactggacgaaatcgcacgcaggctgcattacaacccaaattatttaagcagtattttcaaaaaagaaatgggaatttcattcagcgagtatgtctcaagctaccgacaccatatggcgaaaagctggcttgccgaaaccgacatggcggtcaaggacattgccgaaaagctgaaatataaaaactcgcaaaacttcatcagatcatttaagaagctggaagggattacaccgggaaactaccgccagcaaaaaagaagcatgtaaaaaacccaaaaccgcttgcgcgttttgggtttttccaatgttattttgcttgtttaaacgcttcttcgtattcctgaataatttgttttcctccgcttgactcccatttttccacttctttatcgaactggctttctgtgatgtctccaatcatatatttgtaggtcgcgtcatcaatgattttcttcagttcgtcaccccgttccgactccgatgcggaatacaggctttcagccgggtttgagacgataatcttttcattgtcctcggtcagctcctcgtacgccgtccgaagcggatctccagtgttttttaagtaggctttatcaatggcaattaaagcggacagcggctgaatatcagtctgccagtcttttacctggctttctttgcgtgtaaacgttttgtcctcacctttgttgtaatgaacgccgtcaatgccataagtcatcaggctatagacatcttcttcggcaattcggtcaaaaaacgccaagatccgtttaagctcagcttccgttttcacactcgttttcgggaaagcaaacacgccgttatggcctcctgatgcccatacccgctctttcccatctgggccttttatgcggttgatgatctcgagcttcatcgatttatcagaggcatggtcgcgcagattgaccgcatctaccatattgccaatataaattccggcttttccttgagaaaacagctcctgctgctgggttttgcttgtgacgggaaaatccttattcatatacccgttatcacgcagctttttcatatagttcatcgtgtctttgtattcctgtgtcatgaaatcaggcgtgaatttgccgcccgattccttccaatctgtcggcatgccttcatacgagccaatcgttttaaacgcgccgtaaatcaagtcattacggtctgccagcccgatcgtatcatctttcccatccttgtccgggtcgtcctccgtaaatgctttggccacttcataaagctcatccaacgttttcggggttttcaaatttaaattgtccagccagtccttccgaatgacgatcccctgtctggaaagcgggcgctctctgtatatcccgtagagctttccgtcaattgtcacatttttattaatgagtttgttcattttgtttaagttgggataatccttgatataatcgccgatttcccaaaacattcctgaccgaaaggcattcatgactgacgaatttttaatatcctggatggtcacgatttgcggaagattcccggctgcaagcgctgcattcagcctgtcttctttcaccgcgtctggaacccaggtgatgtcgagttctgtatttgtcagcttttcaatttctttaatcgccctgtccttcggcggctgctgatgatacaaaatcgccatccaagacagctttatctttgaatctgggccagctttgccttcagccgaagactgatcagttcctttacagcccgccagcactccgccgagtgccagtacaagcacaatcaaaagcaccctccatttgtttcccatcgtacccctccgtttcatatttctttatcctttgacagatcccagcaaagctccttttgcaaaatgcttttgtataaacggatagacaagcagaaccgggatggtcgccaccactatgaccgccattttaatggtttgctcaggcggcgggctgcccgaccccatttcagacatatccccctgcataccgcttgatacaatgacgatttggcgcagaagaacctgaattggccattttgctgaatcatttaagtacaagatcgctgtcatatacgtgttccaatacgtgaccgcataaaatagtgaaatcgttgcgatcgcaggaagagacagcggcagcacaattttaaagaatatgcccagatcattgcacccgtcaattttcgcggactcttccaggcttgatgggatattttgaaagaagtttttcagaatgatcaggttaaaggcattaatggctgtcggcaaaataagcgcccagtaagaatcgagcaatccaagcgatttgaccacaaggaaagtcggaatcatgccgccgctaaacagcatcgtaaatacgacgagaaacatgagcggctgccggccgattaaatcatggcgggataacccgtaagccatcagtgaagaaagaaacatgctgaccgcagtgcctatcactgtcacaaacacagaaacaagcaaactcttataaataatatctgttgaaaaaatgtagcgataagcatctagcgaaaaagtggtcggtattaaaataaattttttcgacacgacttcttctactgtggcgaaggatgctgcgatgacatgaatgaacggaagtacgcatattaaagcgaacatcagcaagaaaccataaatcaacatatcaaacagacggtttttcagtgaatgtgcgatagctcccacctctctttgtaagcgttatcatatttcggaaaccgagctcagcatgtgacgatatcgtgtctaaaatgtagcaaatctgtgattgccatgtctataatcatttgaacagtgtccccggccgggcgggggctgccgcgaattgagaccgataacaaaagaaaaagagcataatcttagaaaatgattatgctccgttctcctcctcgttcagaagttcagccgtattgatttgtggcgaaaacccaagttcattcacggcagattcaatggaccatggccggcccggattatcagagacggcgtaataagtgccgtaccggatattggtctcaatagcggctttgaaaatcgacagcagatcggggtgagaaagcagtgtctttttcgtccgttctttttcatgcagcgtatccatttcatctgtgacgactgttccgattcgcaggttgattactgatagcttattttccaaataaaacaaatggccgatctgttcagaggtcagctttaatacaccgtacaagttttttgacagcggataatcgcttgttgtgatttcccgtcctaagagcgagcgcccgtctttttcgtagacatctgtgacatgattactgctggcgaacacgagcttttgaatgccgagctccgctgccgcacggcacagataatagcttgccctatagaaaacatccgtcattttttcaaactcagcgatgtccataatatcgtatttgattttcacagcgagtaaattcaagatgacatccgtatcttttggaatcttcttcaacagctcctcataatttgccgcgtcagcctgaatggaagaggctttgccatcgaaatgatctttatcaagcacagtcacttcatagtctgaaataagcccttcagcaagcagtctcccaatcacaccatttccgccggcgatcagcacttttttcactatgttcactccccttttttatagattgcccattttcggcggggctgacacttttttggcactcacattcttaggcttattcaaaagtcaccggcagctcctcaagcgcccgaaatccaaaaagcggccgataccgccattcaaaatccgcgagattaaggctgggcattcgctgcagaagagtgttaatcgcaatttgcgcttctaatcgtgccagcgaggaccctaagcaaacatgatggccatgcccgaatgaaagatgcggattaggacttctcgtaatatcgaagacatcggggttcgtgaatatgctagggtctcgattagccgcccctaacaaaagatagacttgttctccttgacggatcgtcaccccgctgatgtcaatatcctctgacgcaactctggctgtcatttgcgtggggctttcatagcgtaaacattcctcgactgcggtatcaataagatctggattttctctcagtttcaaaagctgttctggatgctgcagcagacaaaggactgaattgctgatgagattgaccgttgtctcatgtccggcgatcgccagcaatatgcacgtagatgccgcttcctcttccgtcagcttatccttttctttccccttcaagagcatgctgatcatatcctgttgagggtggcgttttctcttttgaatcagctctttgaaatatgccatagcctgcacagccataatattgccctctgttaatgcctttcttgagcgggtaaaatcaatcgtttgaatgagactcgcagcccactcctttaattgctccctatcttcctccggtacacctataatgttagctatgacaaaacttgctaaaggaaaagcaaagtccgaaatgacctccatcttttttttaccttgcacttgatcaagcaaatgatggacagtttcaatgatatacggctgataactctctgtcgttctcggcgtaaacgctccgctggcaagcgtccgcaatcgtctatgatcaggccggttctgaaacagcatcatttgattttgcacatgtgaaaggtcctgatatttggttgagctctcaggcagcggggtgcggactttgaatctcgcatctttcaaaatagcagccgtttcttcatatcctgtgacataccagcccgggtattttaagaaactccctttatagataggatgaacagctcgcaatgtgtcgtaaaaagaatatgggtttttcaaaaactcagaagatgcagttgacgatgcaattgtcacgtgattttctcctttctgttcaaaaataaaagcaatcgacatcataccgattgcttttattgattctttcagcttttcgcacttaaactggccttcatttcttcgactgattcaacttcaaagcctaaatcactcagcattttatgatcctccgtctcctcttgcccggcagttgttaagtagtctccgacaaaaatggagtttgcggcgtaaagccctaatggctgcaatgagcggagattgacctctcttcctccggaaatgcgaatttcttttgatggattgataaaacggaacagcgccagcacttttaaacaatacagcgggtttaattcgttgacgccttctaacggcgtgccatcaattgcatgcaaaaaattcaccggaatggaatccgcgtcaagagccttcaagcttttggcgatgtcaatgacatcctgtttcgtctccttcatcccgataatggcgcctgaacacggagacagccccgattcttttgcgatttcaaccgtattgactctgtcatcgtatgtatgtgaggtcgtgatgtttgaatggtttctctgtgacgtattcaaattatgattatagcggtctactccggcatctttgagacgcttcgcctgctctggcttcaacagtccgagacacgcacaaaccttcagtccatacgtctctttaatttcctgaaccgcatctacgacctgatccacttctctgttagacggccctctgccgcttgccacgatacaatatgtgccgatattcagatcgtgcgcccgcttcgcgccttcaagcagcgtttccttattcaccatccggtaagactcaatcggcgctttcgaaatcgcagactgtgaacaatagccgcagttttccgggcagagcccggatttcgcattcataatcatattgagctttactttttttccataaaagtgttttctgatatgaaaagctccatgcattaatagcaaaatatcttcatcaggacaatgtaatattgaaagcgcctcttcgtcagtcacttctgctccagccagcacccggtctgcgagttccatccattgattcattctcatacccccacttgattcatcagtaatgatagattgatatggtcttttaccatatgtagaaccgtttctttcgtcacgttggcaagctttggcgtaacccctaaaatcggcacaccgcataagcgctcaatcatctcaggattggttttttcatcttcatcaggagagtcactgattccattgatgataattccggcaattggaagccccatgctttctgcatatttgacagttaaaaaggtatgattaatggttccaaggtgaggacgtgccacaataatcatgggaagctgcaacgcttttatgacatgactgaccaaatagtcctctcccaatggcacagaaataccgcctgcaccttctacgatgaagcattcatgtttttctctaatccgcccccaatggcttaaaacctcttccatggtgacagtctttccctcaagtttccctgcaacgtatggtgcaagcggcgctttgaaggcaaaaggcgtaatgtcttcatgagaaagactggtctgcgacatgtctttcagcaaacttgtatcactatctggatgatgacgcgatatcccgcttaaaaatggtttatacacaccgacatctctattatgttctttcaataaggcagcaagaccgctggatataaccgttttccccacttctgtatcagttcccgtcacaaaaaaacccctcaaatgatatgcagctcctttccgattgaatgaaatgttttcagcaaatcatcaatatcacccatactgtggtcagacgtgattgtaattcgaatacggctttcacccggtgcaacggtcggcggccgaatggcaggagcataaattcccttgccctgcagtttttcagcaaataggaccgttttatgggcatcgccaatgactacaggaataatcggtgtgtgatctcctttcaccacataacccatattcttcagactggttctgatcgtactgatataagaaaataaaagctgtcgtttttccctgctggcttcaatgatgttgaaagcctcatgagcagccgcacagctggctggcggaatagcggtttgaaagataaatgttctggcatggttcagcaaaaagtcgatgaagaccgctgatcctgccgcaaaacctccttccgcgccaacagctttgcttaaggtgccgatcacaatgtcgggacaaacaccaaagtattcactcgttcctcctcccgaatcgcccaaaactcctgttgcgtgggcatcatcaacgaccacgaaggcatgatagcgtttcgcaagtgagatgatctgatcaagaggggcgattgtgccatccatgctgaataccccgtctgttacgataaaacggcgctgataacgctgtgtttcattcagcttgttttcaagatcattcatatcaatatgccgataaacaactgtatcagccttagaaagtcggcagccgtcgataatacttgcatgattgagctcgtcacttaaaatgacatcttccttttctggcaaggatgaaaggagaccgacattggccaagtaaccgctcgaaaacagcagggccgcttctgtccgtttaaagctggcaatcttcttttctaacttttcatgccagaccgaattgcctgtcgttaaacgtgaaccgctgcttcctgtcccaaattgctgcaatgctgtttgggctgcatcgatcaaacgtctatcgcttgcgagccctaaataattgtttgaggaccagaccgtttgattttcgccatcaatgttccgctctggaaccggcgctccatccattgaccgcaggttacggtgtacgccggcttcctttactatgtctaaccgctcgtttaaccaggaatcaatcttcaaggctcgtaacctcgtggatcgcttgtttcataatggcaaccatttccgagagctcttcagctgtgctggcaagaggaggaagaaatgcaatcacgtccccaagcggccttgtcagcattcctaactctctcatttttaaggaaactttgtatccaatccgccgatcagccgggtaaggttctttggtttcctttgatcgtacaagctctgcaccgcacataaagccaagctgccgaatatccccaacataaggaagagcgtgcagatcttgaagaagaaaatggagctttttactttttttcgctacttgttccacaatgttttcagattcaaataatgccagattttcaagcgcaactgcacagccaagctgattgcctgtataggaatggccatggaaaaaggtttttaggttttcataatcatcatagaatgccttatagatgtcttcagtggcaaacgtaacggcaattggcaaatagcctcctgtaatgcctttaccggcagccatcagatcaggctggacattctcgtgctcgcacgcaaacatttttcctgtacggccaaagcctgtagcgacttcatcaacgatcattaagacatcgtatgttgtacatagctcgcgcacgcctgccaaatatccttccggcatcacgatcataccggaagccccttgtaccattgattcaatggaaagcgcggcaatttcctcgtgatgttccttaagcagctgttcaagctctcggaggcactgatcacggcactcatcaggatcaccgctttcagagcgatacacataaggaatcggggccttgtaactctcgaacatcaacgggccgtatacgtggtgaaaaagctcaattgaaccgacactgacggcgccaatcgtatcaccgtgatacccgtttttcattgcgataaatttttgtttctcgggcttcccgatgttcttccaatactgaaacgccatttttagggctatttccatcgcttctgcaccgctgtctgaataaaagacccgcgtgagcttttttgggctgatatcgattaatgtttcggcaagctgggttgctggaacgttggtcatgcccaataacgtggagtgcgcaatttttccgagctgtttttttatggcattatctagttcttttttgcggtgtccgtggacattaagccaaactgatgaaaaaccgtcatagtattccttgccatttatgtctttgactttgattccagtcccgctttcgatgattaaggggttttcatcataatctttcatttgggtaaatggcagccagaggtgctttttacttttttctatcaaatcatgagtcatgatcttcctcccactctattaaaataggctgcttctccagatcatgtatgtacgtgtttacatcattggatccatcaataaaaaagactcggcagccctcttcagtcccgtattctttcattgctgtaatacgctgatagcccattttcttacccgcaacatagcctgttatgtaatccggatcgtccgaccagcataattctgcaacggctgccgggtgccggcttacctttgaagcgagcgcaagggcctcttttattcttgaatgagccggcacgtgactgtgaagcgcccatttttcaaaattagcgtccggccaatccattctggagacccgcacccctttttcttttgtttgatccattcgctttcctgtatgaatatcaaacaacaccgcacccctgatatctgaccattcagggatttgttcatatgctttttcaatcacgtctcgtgaaacgccttctttttccaataacaatcgggccagcttttgcccttcttccgggcagctcacttcattcgtatgcacaggcaatggctgaatggtttttatcgattcatatacctcttcaaattgaatttgcataaaatcaggttttcctcttgaatgggataaccctttttctaataaagcattgactgtatgcttcatctcatggaaaggtataagccgttctccgccggatatatgctttccgccgtcttcatgagatccattcatagaagccctcattctgacactataaaaagtttcttcttgcatcatttctcgccctttcactgataactgaagaacgtgtagtgcttctcaccttaattgttaaccaattatattttaaggttaacaattagaatatattattctctcctgtttctgtcaatagaagaaagcatcgatttatggcagttggttaaaaggaaacaaaaagaccgttttcacataaaacggtctttttcgatttcttttaacagtcacagccacttttgcaaaaaccggacagcttcatgcctcataactgctgtttcgaaatgtcccgaagcagaacggaccactcggtagcaatcagaagctccctgtccagcatagacagctgtcaattctttttcgattttgtccacgccctcggccggcgttaaccgatcgtgtacaccaacaagactaaggtgcgggcgcggcgcgatcaggccttggatctccgatgcggaaaaatgctttgcaagcgatgggacgtaataataaaagccgtgcctgtcaagattctgtgttttgatcagcacgtgatgatccacctggctgcacaaatccacacacaccttaatccggtcatcgagcgccgctgtccaccacgccatcaaacctcccatagacatgccgatggttccgatcctgtcaggctgaacatcagagcgtaactgcatatagtccaacgcacttaaactgtcataaatcatcatcccccacatcacttttccggtgagaagcatttctttaaatatctcgctttccgcttttccccgccgatctccaaatccccaatgatcaatcgcaagaacgccgtatccgagtgaagtaagctcatcagaaaaagaaggcgttttcaaataatccgctccctcaatcagctcactttttcccctatcatactggcccccatgcgaatgctgaaacaatacggctgggcacggtccttctgttttcttcggcttcacaaaataagcgggcaccttttcatgtccatttaaatcgagcaggagcgtttcaacgatattttcttctctttcttcaatacgtaatgtctcaacactgattggcctccgatcaggcaaatcaccaagcaatcgaaacagttgctttcttctttcggctctcatcccatcacccttccttattcgcttacttcacatttacgagacagatctgggttcccctttatttttccaacataaatcacatcatttactaaatatttagtaaatattatgaaatatttcgaaaacaattattgtaaccgcttacttttatatgatagtatcaatttatcaaaaacagatgagttaatattttactaaatagatgagagggatacccatggttcgtattaaagatatcgccttgaaagctaaagtttccagcgcaactgtgtccagaattttaaatgaagatgagtcgctttctgttgcgggcgaaacgagacaaagagtcatcaacatcgctgaagagcttggttatcaaaccgttgccaaacgccgaaaagcccgcgggcaaaaacagcgggctcagccgctgatcggtgtgctgagctgtctgtcccctgatcaggaaaggcaggacccttatttttcttccattcggaaagggattgaaaaggaatgctttgaacaggaaattttcattacaaattcgattcatctcggctcctttcaggaacatatctttcgggaattggatggtgtcattgtcatcggccgtgttcatgatgaagcggttaagcatatcagcgggaggctggagcatgccgtatttatcaatcattcaccagatccgcaagcatacgattcgattggaatcgattttgaatcggcttcacgccaggcgattgatcaccttttcgacttaggctacaaacggttaggctacattggcggacaagaaaaagagcatacgctgaaggacggccaaagcattcgcagaacgattgaagataaacgcctgaccgcttttttggagtcagccgccccccagcctgagcatgtgctgatcggagaatacagcatgcgtgagggctatcgcctgatgaagaaagcaatcgatcaaggccatctgccggaagcattctttattgccagtgattctatggcgatcggcgcattaaaagcgctgcaggaagccggactgcaagtgccgcgggatactgcaatcgtcagctttaacggcattgaggaagctgaatttgccagcacgcctttaacaacggtgaaggtatacacagaggaaatgggccggacaggcgtaaaactgctgcttgaccgtctcaatggccgaacacttcctcaccatgtcaccctgcccacaacattaattgtaagacaaagctgcggatgtacagcaaaggaggtgacataagcaaagattcatcacgatgataaggaggaaaagatgaaacacacttttgttttatttctctcttttattctgcttgttctgcccgggtgttcagcagagaaaagctcagcagataccgcaaaaaagacgttaaccatttattctacaatgtcaaccgacagtgaaagagatacgttcagaaaactagcggcagcattcgaaaaggaaaacagtgacattcatgtcagccttcatttcccaggcaatgactatgaaaatatgatgcgtgtcagaatggcggccaatgatttgccagatctattcgatacacatggctgggggaaaatcaggtacggagaatatacagcggatctccgggatatgaaatggactcaagatcttgatccaaatttaaacagcatcctcaaaaataaaagcggaaaggtgtatgcctatccaatcaatcaggcaaaagacggtctggcgtataatcgcaatattttagaccgttacggcattgctccgccggaaaccatggatgactttatcaaagcactgagaacgattaaagaaaagagcaagggaagcattgttcccttctggtttgccggatatgacaaaagctcattcgcccaatattacgaccaattcgctacacctcttctcatcacagaccctgcccataatgaaaaaaaacagctcaccaatggcactttcaaatggaataaatttacttacttatcgaaaatcctcaaacaaatgcagaaagaaaaattgattaacatcgacgccgtcacggcaaaaaaatcacagctcattgaattaatggcccaaaacaaaatcgcctttacaatgcaaggcggcacactcggccaagacgttgcccagatcaatccgaacgtcaaggtcggcattatcccgacacctgccatccatcccggtgatgacccgatatggatcggcggtgaacgctacacccttgcagcatggaaagattcgcctcaattaaaagaggcaaaagattttatcgcatttatggcccgcccggccaatgccaaacaaatggctgaagccacatcgcttccttcagggctgaccaatgtgaaagctgatattttctacgcaaacgattatgagcattatcaagatgtcaaagtcgagccttacttcgaccgtttatacttgccaaacggaatgtgggatgtcctaggcacggttgggcaggagctcgcggctgacattttggcgcctcaagacatttcgcagaagctgggaagagaatataaacgactccgggagcaatcggaaatacagggagctgaaaacaatgagtgagatcgcaagggacgttcatgtgaaacaggttaagccaaaaaagcagtcctcactttggtggatgtacattcctgctttgctctccgttctggtctttatgatttatccgtttgtgaaaggcacattgattacctttacaaactggaacggcttttcacaagtttaccaatgggttggattcgcgcaatatgaaaggctgttttctgatcctgacacttggcatatcttaaaaaacacgctgctttacgggcttggcagcactttttttcaaaatgtggtcgggcttctatacgctctgctcttaaatcaaagcattaaaacgaaagcggtaacaagaacaattgtgtatttgccggtgatgatcagcccgctcattatgggctacatatggtactttttcttctcctatgacggaggcgcgctcaacgatttgctcggggtcttcggcatcagccctattaatgcgctcgccagtccctcgctcaatccatggatcattgtcatgattaacacctatcaatatgtcgggattgctatggttgtctacttagccggtctgcaaagcattccgaaagactactatgaagcggcgcgaatggatggcgcgaaacaaggccagcagttttttaccatcacgctgccgctgttaatgccctccattaccattaatatggtcatcaatattatcggaggcttaaagctgtttgacgtcatcattgcactcaccgcgggcggtcccggaaatgcgtcacaatccatgtccacgtttatgtatgatttgtatttcaaacggcaggatgccggctatgccgcaacgcaaggcatatttatggcatttgtcattttgatcatcagcttttgcgcgcttgcgtactttaaaagaaaggagacggaaatgtcatgagagccgtccgtacaaaaaacatgcggatcattacgcttcttgccgccattgtggcctgtgcgcattttattcctttttatatcctgctgaccacttcattgaaagcaaaaggagactacagttcgaaatggatatttccagccaacatctcctttcacaatttctcagaggcgtgggagcgcgcttcgctaggtaactcttttataaacaccatgatcatcacaggtttttctgccttgttattaattatattcggctcacttgccgcctacccgcttgcccggagggaaacgaaactgaataaagccgtttttgccttgctgatttccattatgatcatccctccgttaacgtccatggttcctttgtaccgaatggtcgtggacgccggaatggtcaatacacacgcaatcgccattttcatcaatacagcagcttacatgcctttaaccgtattcttatattcaggctttatccgatcgaccattccaaaagagcttgaagaagccgcaagaattgacggcgcaggcatgctgaaaatcttttttacgattgtgtttcctctgctgaagccgatcactgcgaccatctgtattatttcttgtgtctttatttggaacgactatcaatttgccattttctttttacaagatcaaaaggttcagacattaacagtcgccatggcaagtttttttggagaaaacgcaaacaacctgcatttagttgccgcagcggcacttatggcaatgctgccgatggttgttctgtttttggcgctgcaaaaatactttattgccggcctgtcttccggagcggtaaagggttaacattaaagggggaagcaatatgaaaaagattacatttatcggtgcagggagcacgattttcgccaaaaatgttttgggagactgcctgttaacagaggcactgaatggatttgagttcgctctttacgacattgatcccaaacgcctgcaggaatcccagctcatgctcgaaaatctaagagaccgttataacccaagtgtggccatcaacagctatgatgacagaaaactcgccttgcaaaacgcaggctatgtcatcaatgcgattcaggttggaggatacaaaccgagcacagtcatcgatttcgagattcctaaacggtatgggttgcgccagacgatcgccgatacagtcggcatcggcgggatattcagatctctcagaacaatcccggtcttatttgatatcgcaaaagatatggaggaaatgtgccctgacgcatggttcttaaactatacaaatccaatggccactcttacaggcgccatgctccgctataccaatatcaaaacaatcgggctctgccacagtgttcaagtgtgcacgaaggatttatttaaagctctcggaatggagcatgacggaattgaggaacgcatcgcaggcattaatcatatggcttggcttttggaagtcaaaaaagacggcacagatttatatccagaaatcaaaaggagagcgaaagaaaaacaaaaaacaaagcatcatgatatggtgcggtttgaattaatggataagttcggctattatgtcacggaatcgtccgaacataacgcagagtatcacccatactttattaaacggaattaccctgaactgatcagcgagctgcaaatcccgctcgacgaatatccgagaaggtgcgtcaagcagattgaaaattgggagaaaatgcgggatgatatcgtcaataataaaaaccttacgcacgaacgctcaaaggaatatggttcaagaattatagaagcaatggaaacaaacgaaccattcaccttcggaggaaacgtcttgaatacagggctgatcaccaaccttccttcaaaagcggttgtggaagtgacatgcgtcgccgacagaaaaaaaattacaccgtgcttcgccggagaactgcctgagcagcttgccgccttaaaccggacgaatattaatacacagctgatgacaatcgaagcggctgtcacacggaaaaaagaagcggtttaccaagctgcaatgcttgatccgcatacaagcgcggagctttccatgaaggacatcatctccatgtgtgacgatttatttgcagcacacggcgattggcttccggcatacaaataaaaactaggggaccgctctcccctagttttttggttttgtttcgccttcccaggccatcatgccgccttcaacattgactgttttaaagccttgctcatccaggtacttgcagacgttcatgctgcgcattcctgagcggcagataaatacgtactctttgtctttatcaagggtttccattttttcaggaatatcccctatgcgaatatgaacggcttgcgggatcatgccttccgctacctcttcatcttctctgacatcaattaaatataattcttcgtccgcctcaattttttctttcaaagcggctgtgctgatttcttttatttccaaagaaaacactcctattcacagtgatcatgttcagtatatcaaagtcagctgaacgattgctattctgagactgatgaaaaaaatccccttttggcaaaggggattttttctaggcttagtttgccacaatattgacaagcttgccaggcaccgcgatgattttccgaatcgttttgccttcaagctgctctttgaccttttcatctgcttgagcaagctgttccagctgttctttcgttgcatcggcaggaacctgtaatttcgcttttacttttccgttcagctgaataacgatttcaacttcatcatccacaagttttgtttcatcatatacaggccaagcttcgtaggcaattgtgccggaatggccaagcttctcccaaagctcttccgctaagtgtggcgcgacaggagaaagaagcttcacgaagccttccatatattctttcggcagttctgttgctttataagcttcattaataaagaccatcagctgggaaatacccgtgttgaaacgaaggccttcataatggtctgtgactttcataaccgtttcatgatagacgcgctccaatgtttcacccgcgccttcaacgattttgtcattaagctcaccgctgtcttcaataaataggcgccatacacggtcaaggaaacggcgcgcaccgtctaatcctgattcagaccaggcgattgaagcatcaagaggtcccatgaacatttcgtacaatctcagcgtatcagcaccgtgagaggccacgatttcgtcaggattgacaacgttccctttagatttactcattttttcgttgttttcgccgagaatcattccttggttgtacagcttttggaacggttctttcgtcggcactacgccgatatcataaaggaacttatgccagaagcgggcatacagaaggtgaagcacggcatgttctgcaccgccgatatacatatcgaccggaagccatttttccaatttttctggtgatgccagctgatccggattgtgcggatcaatatagcgcaagaaataccagcagcttcccgcccattgcggcattgtattcgtttctcttcttccttttttccctgtctcagggtctgtgacttccacccactctttaatgttcgcaagcggtgattcgcccgttccgctcggtttgatttcatccgttttcggcaaaatcagcggcagctcctcttcagggacagctgttgacgttccgtcttcccaatgaatgaccggaatcggctcgccccaataacgctggcggctgaagagccagtcacgaagacggtatgtcactttcttctcaccgtttttcgtttcttccagccaagcgatcactttttcaatcgcttcctgtttgtgaaggccgttcaggaaatcagagttcacgtgctcgccgtcgccagtataggctgcttcctcaacgttccccccttttacgacttccttcaccggaaggccgaatgttttggcgaattcaaaatcacgctcatcgtgtccaggaactgccatgacagcacctgttccgtatgatgcaagaacataatccgcaatccaaatcggcagtttttctccgtttacaggattgatcgcatacgctcctgtaaatacgcctgtctttgttttcgcaagatctgtgcgttctaggtcactctttgattgaatttctttgatataagcttcaacagcttctttttgctctgccgttgtgatgttttccaccaatgcgtgttccggggcaaggacagtgtatgtagcgccaaacagcgtatctggtcttgttgtaaacaccgtaaaggaatcatcatgtccatctatagcaaaatgaacgtgagcgccttccgaacggccgatccagttgcgctgcatatctttaatgctttccggccaatcaagctcttccaagtcctcaaggagcctgtccgcataagcggtgattttcagcatccactgcttcattgggcgtctctctaccggatggccgccgcgttcgctcttgccgtcaatgacttcttcgttggcaagaacagtaccgagcgcagggcaccagtttacaggcacttcgtcaacgtaagcaaggcctttttcgtatagctttaagaaaatccattgcgtccatttatagtattcagggtcagtcgtattgatttcgcgatcccagtcatatgagaagccaagcgcttgaatttggcggcggaagttatcaatattctgcttcgtaaacacagcggggtcgttccctgtgtcaagcgcgtattgttcagctggcaggccgaatgcgtcccagcccattggatgaaggacatcatagccctgcatgcgcttcatgcgggacagaatatccgtagctgtgtatccttcaggatggccgacgtgcaacccagctccagacgggtaaggaaacatgtccagcgcgtagaatttttgtttttcattattatcaagagtggcaaatgttttgttttcaagccaatatgtttgccatttcttttctatctctttgtgctgaaaactcaaagtaaaaacctccttctgattgaatacggcgtgtatggttcaagtattgacgggaaggagaggattattcagaatattcccaaactaaaaaaaactccctcatccctaaaagggacgagagactttcgttttcccgcggtaccaccctcgttagcgcggcatacgccgcactcacttgatacttttaacgcagttatgcgtcagcggcttttcaccgctgcaactctgaggtgagttcggaaacaaacttgattgactttcaccagccgtcaactctctgcaacaatatctgtttcttactgctcctcttcattgttcttatcgcaaccgtaatctaactgtattttatagaattctgttcataagtgcaagcaggtttgtatacaatgggaatgtaccctgaacgggcggagattgaggacaattattcgggtggagttttggtttgacgtttggactcggccggttcgccgccgctgttcagttctctcacaaagtcaaaacttctgagaacagcttcaccgccgtagcctgagataatggataagatgacaagttgaattcctgaatcggggtcagcggataatacaagtaaaatggaagccgtcatgccgataaaccaatcttccaaaaatccaaggtagataaaccgcttcgtcattctgggcttctccagcctgcctctctttttcacatgaccgagaatccccatgattcctccaattacacaagcaatgagtacctgatgcagcatcttcatcatcaccttcctaaagcccttatttcgtaaagcgacttcaggccatccagcccccttaaacgattccgatgattttcgatatctacataccggcaaatctgtaaaaagcttgtttcttccattatatgtgaacacatgatcggtaagcttgatgcattggattcatttttcacccagtgacattgacctagtcacctatttagcatgtaaaaaacctttccgttcatatgttcaaattctgttcttatttttagtgtatacgaggacaagccctaatgacaaacaacaaactgcacttgcttgaatcagaacatgtgttgtgctacggttactgtagaattcattttaaaaaggggaatatcaggctttcgcatagcaagctgacggcctaagggggatttatatggctagttttcaatcatttgggataccaggacagctggaagtcatcaaaaaagcgcttgatcacgtgcgagtcggtgtggtaattacagatcccgcacttgaagataatcctattatctacgtaaatcaaggctttgttcaaatgaccggctacgagaccgaggaaattttaggaaagaactgccgcttcttacaggggaaacacacagatcctgcagaagtggacaacatcagaaccgctttacaaaataaagaaccggtcaccgttcagattcaaaactacaaaaaagacggaacgatgttctggaatgaattaaatattgatccaatggaaatagaggataaaacgtattttgtcggaattcagaaagacatcaccaagcaaaaagagtatgaaaagcttctcgaggattccctcacggaaattactgcactttcaactcctattgtcccgattcgcaatggcatttcggctcttccgctagtcggaaacctgacagaggagcgatttaattccatcgtttgcacattgacgaatatcttatcaacatccaaagatgattatttgatcattgatttatccggattggcccaagtgaacgaacaaacggccgaccaaattttcaagctgagccatttgctgaaattgaccggaactgagttaatcattaccggcattaagcctgaattggccatgaaaatgaataaactggatgccaatttttcgtcgctgaaaacatattcaaatgtaaaggatgccgttaaagtgcttccgattatgtaaaaagatcccgctcacccagcgggatctttcagattgttgacaaaatcctaaaatggttttcattttaggattttgtcatcttttcagcgtgattgaaaacccttgaagtctaggaaggacgagcataggagcggagcgaatgttctaattcgtgagcaccgaagcgcaggcctgacaacgaatgcgagggtttgtcgacacgctgaaagatcccgctcatccggcgggatcttttattatgaagagattgatgcctgcttatttgtttctttagctgattttatccgtttgtcatatagaagcgttgtggcaatactgatcagcagcaataccaacagagataaaacaagagccctaatgccgtaatgatcgacaagcactcctccgaacaggggaccaatcattctgccgcctgtcgccgcactgttgacaaagccttgataaaagccttctttccctttaggggcaagctgattggcaatagtcggcacagcaggccaaacaagcatttctccaatagtcaggatcaccatcgcagcgagaaacatcggaaattgctttgcagtcagcagcatgctgaaagacacaataaaaatgataaagccgatgaccatttgcgcttttagcgactcggcccattttttcaccacaaaactgacgagcggctggccgagcacaatgagaattccgttaaccgtccacagcacgctgtataaggaaagagatattccaatgctttgtgtgtacgaagcaattgtggttgaccactgagaataagccagccatccgagtacatagcctccgcttaaaatgatcagtgcggcaaattttgctttgctgttcacagcatcgtaatcaagcacagacgtttgggacgcatctcccgtctgaatatttcgaaatccgaaatatacaataaagaaaaagaccagatacagcgcggcattcgccaaaaatacatatgaaaacgagaaagacgccacgacaccgccaagcgctgaaccgacagccacacctgcgttttgcgcgacatatatcgcattaaatgccttccttcccccttcaggccataccgatcctgccattgcgtagctggccggaaaaacaacaccggagccaaagcccacaatcgtcagcagcacaatataggctggccaatcatgaaaaaagacaaggcccatcaggcttgctaacgtaatggctatcccaagcataatcgatttaaaaccgccgattttatcaaacaaaaaacctccgcataaattgccagccacactggcgccggaattcagcatcaggacaagtccggctactgttaacgactttcctaaatgattatggatataaatcgtattcagcggccataaaaaagaagcacccgtcacattgataaacattccaatgactaaaattttaagagcacgcggcatactcatccccctttcttacctaaaaaagctcatgaaaaaaacgaaacctaaaacggctccgtacgaatccagttatcatagcacattcattctatctgtctctctcacatttttcaactgatgagcgtgaaaaaatctaacaaatattgtttgaaaaatgtaaaataaatagaaaaagggggcatattatggaaatggcattagcattcttaggttttctggcatgtctcattgcactgggctatggattatatcactttgtcagatatgtactgaaaaaggaaaaacgtttctccaagagacttttttggccgcttttcattggaggccttgtgctgctctttaccggagcagcattggcagaacctgacacttccgcagcaaatgccgagaaaaaatattcagcgctaaacgccgaatacaaaaacctcacaaaagagcatgaagaacttgagaaagaatataaatctgtcagctctgaagcaaaaaaattaaaagacaacaaagaagatcaagacaagcttgagaagcttaaaaacgaaaatagcgatctaaaaaagactcagaaatcattaaaagctgagattaaagagcttcaagaaaatcaaaagcagctcaaagaagatgcaaaaacgacaaaggctgaaaatgaaacactccgacaagataaaacaaagcttgaaaatcaattaaaagagacggaaagccaaaccgccagttctcatgaagacactggaagttcttcaaacaatacgagtaaaagtgatgaaaccaaaacagctgacaaagcagaaggctgtaatatcaaaggaagcaaaaacggcatctaccacacgccaggcagtacatactatgaccggacaaccgatccggctgaaatgttttgctcagttgaagaagctgaagccgccggttatcgggcgccaaaacgataaacaaaaagctccagtatgtctggagctttttctgtttcacaacgacgatttaatgaccttcttataataaagaactgacagaaaaccaaaaatggagtagagcgcagtatataacaccatcaccataatcatgggcgcccatatctctgatccgaataagaaccagccggattggacggcaaagtaactgtggaagagcccgacaacgagcggaatgccgaagttatacatttgtttgatgcgtattccctttattaggtcgccctgcgtaaagccgagttttcttaaaatcgtatagctcggtttttcatcttcactttcacccatttgtttaaaataaaggatacaacctgatgtaatcaggaacgttaaccctaaaaagccgacgatgaacatcaccataccaaacagtgatttttgcgcagcgcttgtatccaatcttgataaatgctcgtttttcttgttcacctgttgaaaaagctcatttgctttttccatttgatcttcatgtttcacattgacgccgataaatgtagattgcgccagctgaattcgggggtctttatccttgttcagctgtttaaacaggctgtcatccacaatgacagcgggcatgcccccgcttgtaaacgtgtaggatacaagaaactcttctcttaatcctttatattttaatggctgcgtctcatgtttgctttttactttaataacaccagagtccttgaaaaccattattttttgcagcaagtcggtgtatcctgagaaaacggcttctccagccgccacatcgactccttttacatctttgtcgctaacaacagcaagctgcatattgctgggatcgccctgcatctctttcggagttccatccataatatttgcaatgtcaacatttgcttgcaggacaggtgttgccttttttacaaacgagatgttgctttccctcaatttgttttcaaataacttggcatctttctcattcatgaatgaaaaatcagccgctacattttgttcagcggtcttttccgacgagtaatacgagatgtaagcaagagataacagcccgatggcgagcgctgaaacggttgtaataatcgtcagcagcagcgcattcgatttcattctgaacatgatcgatgacagtgacagaacctcagaaatatttaagtagccgcccttgctttttcgaatgatattcgagataaacgtaactgatcctttataaaacaaaaacgtcccgataatgacgctccccagaatgaagctcatcgcaacaaacagttcattaatggtcttaaattttccgccaaacagctcagaagacacatagtatcctgtcaaaatcaacacgatgcctaaagcgccgatcagcatttggaaaaatgatattttcttcactttgtcttcagtggaggacgttactttaaacaaagataaaatactctgttttttgataaacgtataattcatgatcatgatcaaaaggtaaatgccgcagaacacaatgaccgtttggaccaaggcctgctcagaaaaatgcagtttcgcatccgctttgacatcgacaattttgaacagaatcatcaagacaagcttcgatatcgaaaacccggccgctaccccgatcgctaatgaaccgaaatacagcatgacattttctgcacttaagatgcgaaaaattttatgcttcgtcattccaattaattgaaacagcccgatttctttactccgtctcttaataaaaatcgtattggcatataaaatgaagatcgccactacagccacaagcaaaatcgaagcggttttaatagccgcggctcccttgattgaagccttcacttcgttaattgctggatcatactgcagcgtgacaaaggcgaaataaagcgccacgctaaagatgagcgcaaacacatacaaatagtaattccggagattctttttcaaatttcgcaggatgagctgattaatgttcatgctgcaccccgcctaacacgccttgcgttttcataatatcctggaaaaacgtttgcctgtcctggccccctttattcagctgtgtatacatttgcccgtccttaataaaaatgactctgccgcagtagctggcagcgacgggatcatgggtaaccataataatcgtcgcgttgcgtttttgattgagctggctcagcttatttaatagatcggaggccgatttcgaatcgagcgcgccggtcggttcatcagcgaaaataatgctcgggtcatgaataaacgctcttccagcggatgttctctgcttctggccgccggaaatttcattcgggtatttatcccgcaattcatatattcccagttcctttgcaacttcctcaaacttgcgattggcttccttttttgatagtttcgtgatcgataaaggcagaaggatattctctttcactgtcaatgtgtctaacaaattgtaatcctgaaagataaagcccaaatgctgttttctaaattcagccagctgcttttccttcatagccgtcatgtcatttccattaatatgaatggttccgtgactgacctgatcgattgaggacagaacgttgagcaaagtggtttttcccgacccggaagcacccataatactgacgaattcgcccttttcaatgtgaatatcgatgcccttcagcacttcctgtttattcagcttgtttccataactttttcgaattttattcgcttctaaaatcaccatttacgcagtctcctttatattggataatctcattataaaaaggaatgccgggcttttccttcgatacggcgaacaaaaaagaaaagcatgtgacattttcgtcacacgcttatgacatgttcaaattgattccgtattggaaaggttaatgtaaaaactgttcccgcaccaaactccgactcaacatcaatatggatcaataacggcgccgctgctttttttgccaagtacagccccatgccagttgacgcttgatcatggtgatccgttgtggatgtaaaccctttatcaaaaatacgcggtacatcttttggatcaatgcccctgccacagtccttcacttggagctgcgtctgttcccctttttgaaaacttttgatctcgatttcagaggcttcgctgtatttcaccgcgtttgtcagcagctgcctgatgataaacgccagccattttgcatcgctcagcacttctttggcctcgagctgtatgtcaaaaccgatccctttttggatacaccacgattgcaaatctttgatttctttaaagatcaaaggctgaagctgaatgaattctacagacagatcgttttcaataaatgatatccgtttttgatgaagctgctgatcaagaagcagatgaatacgcagccattcatatgacagctgggatttcagtgctttttcttccattctatcaatgattaaatgcatcgctgttaatggagttttgacctcatggatccatgccatcagctcatctttttcattttccaatgctaagcgatgccgtgctgcggtctgcttcaagtgttctgtttgcccggcaatgcttctttcaaccattgcttcaaacggcgtttccggttcatttatggctgtcacatcgagattgttctcccatgttttcaagcttttataaaacgctgtttctttccgatagcggaaccaaaggaatatgataaaaaacaaaatgcacaaatacaccatataaagtacattcccaaatgatatggaaggatcgacaaaaacaatgaacagcatcaaagcctgctgaaacaaaaaagcggcaatccagctccgcctttcgataaggaatgctttaatcatagaacttgtcctcttccttcgcgatgtagccctggcccacctttgtctcgatatatgcaccaagctgcagggcgtccagtttttttcgcaggcgattgacattgacggtcagcgtattatcactaacaaaacgctcatcgttccacaagcttctgatcagctcttcccggctgacgatcttgtttttttgctctattaattgttttagaatgaacatttcatttttggtcagttcaacagatcctttgtcattgctgacgaggttctgctccgcgtctacagcagcgccgcaccacgttttaatcgtattcggctccgtattataatggtgcacacgccggaacatcgcttggattttcgcaatcagcacatcaaaatgaaatggcttttggataaagtcatctgccccgagctgcatggacatcaccatatcagcaggatgatcccgggaggataaaaagagaatcggaacatttgaccgggagcggatcagccggcaccaatgaaagccgtcaaatttaggcagctgtacatcaataatgacacaatcaggattaaccgccgcaaattcctgcagcacctgactgaaatcctgaatgccgtatacatcataggaccatcccgttaaacgatccttgatttcatgaaacagcgattcatcatcttcaatcagcaaaagtttaaacaatcaactcaccgcactttttccttttttatcaagtgtatagcaaaacgctatcatgcgctatagaaaaagccggctgtctcagccggctcgttcgcattatagttctcttctcaacgctgtcagcacgttggtttttgttgcttttctcgccgggttcattccggaaatgactgcgacccctccgcaaatcacaacggcaatgatcacaagactcgccgggatgtaggagaatgtgtaattcaagtcgcccgcatcgcttccgcttgtggccgcaagaatcatcggaacggccaggttgacaaggtagctcacgccgtaagaaatgataatcccaatcacacagcctaaaattccgatatacgcgctttccatcaagaacattcggcgaatgattgacgggctcgccccaatcgctttcataatgccgatctcttgcgttctctctgtcaccgccatcgtcatcgtgttaaaaatgccgatcgctgaaatgataactgcgatacatccgacaaagatcagtccgattttgaagaccatgaagaaggtattggctccctcaagttcagtagtcactgatgtgacatagtacccgtcatctgttagatcatttgtcagctgttccacattctcaaacttatcagcaaaaacaccaatgttcgtttcaacatttccgcctttgaaatctaagaattccgaaaaatcttttttgaattgatcactgataaaaatgtttgagtcctccatccagtcttgagatggtttttttgtaataccgacaattttaaagtcatatgtttttgtttttgtaacatcccctgttttaggatctgtcttcgatacacttagttctattgttttgttcagaatatctttcgtatagccctttggttcttttatatcttctggatttccttttgcttcttcgatttttttgttatattcttccgattcttttttcgtcaataatctctttgcgaagtcgtatcctactacgatttcattttccgactttgcgactcttcccttttccaattccatattggcctttaattcatcattcatattagtaaaaatgagatttgagctttcatttgtacgattgcctaaagtagctttgtttggttcatacacttgcgttctttctacaactgaccttacgtgatcatacttctctaaatcagcttttttaataggcttgtctccttccttgcccattacactgactttcgttacaatctgctggctcattgtcatatctgtaattgtcttttgaatcccaaatccaacggacgacaacacaaccaaaaacgcacacgccattgttgtcgccagaatcgtcataaagacgcgaagcctgtttttcttcatatttcttctgataaaatgaacctgatccttaaacctcaacggtaattcctccttttagcacaccatcatgaagctgaaattttgaatgtccgatagaagcgacttcatcatcgtgagtaatgatcacaaatgtaatgccacgctcacgattcagctgctggatcaattccagcacttcatgttccgtttctgaatcaaggcttcccgtcggctcatccgctaagataatcgaaggatttaaaatcaatgctcgagcaatactgacacgctgctgctggccgcctgacagttcattcggataatgagcggcgtggttttccagaccgacgcgtttcagcatgtcctgcaccttttgcttccgctcagatggcttgattccttttaacgccagcggcatttccacattctcatacgtcgttaaacccgggatgagctgaaagctctgaaaaataaacccgaaatggtcaagccgaaattgcgcccattccttttcattaaaccccgtaacatcagtgccattaatgacaatccgcccttttgtcggcgatatgtagccggaaattaaattcaaaagcgttgatttccctgagccgcttcgtccgacaatgcaggcgatttcccctttcgccacgctcaatgaaacatccttcaatactggaacttcattctcacggcccttttttccgatcgtgaaagaatggtcgatatgctgaacatcaatcatatgttctctctcccttacaaaagtttcattttttataaatcgcaaaataactaatcaagaaaccgattaccgcacctgtacccatgccaatgagataaccggcaaagctctcgcttgcagtaaatccaaaatagccgaagcccatgattcctatgataataacgatgatctgcaccgggcggttaagcggcttccataagaagaaatatccgtttctttcattagacattttaacaaagctaatatagccgatgatgtaaaaaatgatagtcatgatagccggaatgactaaataatatggtgaattctcagcccatttcgagtctacataaattatcggaatgaaatactgcacccatttaggtactggaccatggataaaatctattgatccgccaaaaaggatctcgaggttgatcgcaggcaggctgatgagcaaaaatggcgaaatggccacggtaaatgagactagaagctgtgcgaaactattgcctgtcaaagctccacccgccataacaagcgaataagccagcatgctgacaatgatcattccaaggctgtaattgtgaaaataaacggcctgatcaggcttcaaaagtatgatcagcaaaacagataaaacataacctatgagctgcggtatcacaatcaccattccgccagtaaggaacttcgcatgaaatatctgccctcttgtatacggaaggcttaatgtaaaatcaaaaaagcccttgcttcgttcaatccctagctggctgaccgccaaaacgactccccaaatccaaaacaatgagataaatgagctgtttaaataatcaacgctgaatacgcaggggccgacccaattttcttttccagtgacacagccttgatagatgagatacatatttaaaattgataatggattacccaatataaaaaccaaaatggtgataactaaggcgactttattctgccgccactctttgtaaagcagtccggaatccggcaactcacttccctccaaacctatggcatttcttacacttttgttttcttataaatagagaagtagctcacaaagaatccagccactgccccaatgatcatacccaaaatataaccaataatggaatgtccggtatagtatccaaataaaccaaatccaaggatgccgaaagccataaccagaatttgcaccggacggtctaatctgttccataagaaaaagtgtccgtttcgttcacttggaagcttcttgaagcttataaagccaatcaagtaaaatagcatgctcattacggctggaatcaataaaagatatttactgttaatcagccattcatttacaacgtaactaatcggtactaggttcgataaattgcttgccagagagaaataactctcaggggaagggaatatttcccatatattcgcaccaaaaacaacttctaggtttccaaccggcaatgcaataattaaatacggcaatatagctgctgaaaacgccgttaacagttgggcaaaagcatttccagttaacgctccggcggccatcaccagtgaaaaagccataaaacttatcacgattactccaatgctgctgtgctcaaaaaagtagacgtgttcagggttatagacaagaatcagcagccatgcaagtaaaaagccaatcaattgtgacagcacaatcacaaaaccgcctaaccaaaattttgtctgaaaaatttggcttctgttatacgggaggcttaatataaaatccatcgtgcctttcgaacgctccattccgaggaagcagaccgccaaaatgacacccggcacccagttgatatctatcagattgcttatggaataattcacaataaaatcacaatattgcgggtcttggcgatcaagacacccttgataagacaaatacgtattaacgatagaaagcggatttgccaatactaaaaacgcgatacttaacaaaatcaccacttgattctgcttccactctcgatagaggagacctcggtctaccatctccgcttccctccaaacttcgcaatgaacacttcttccaggttgacaggaagctcattccacacttttggcttcagctctctcaaaaagctctttttctcctcatcgcttttcggaatcagcactgtgtaaaacacgccggcctgatcgagcatcggaatgttttgctctctgatggccaaattgacatctgtatcgaaggccatttgaattttaatgtattcttcttttaactcatcaagatccatgacgttggtcaggctgttatcttcaagaaaaccaattcggttgcacatccgctctatgtcttcaagccggtgggacgtaatcaggatgctcgtatcacgctctgccacttcatcgaccatcagctgcagcacatcatgccttgtcaccgcatcaataccatccgtcggctcatcaaggaggatcagcgccggtctcgccgcaaacgacagaacgagcgatagctgcttttttaagcctgtcgacagctcacggtattttttcgtttccggaatttcgtatctgttcatcagctcattcgcgtacgtgacatcaaatttcggatatattcttctcaaaatatcgactaactgcttgtatgtatacttatcgtaaaacggattttgaacaggcatgtagatgatattttgtttgactttcgggtgctttttgatttctacgccgtcaaataaaatcgttccgctgtcagcgaaaatgatttgctggattaagcgaagcatcgtcgttttgcccgatccattgcgtccaagcaatccaaagatttctcctttttcgattgttaatgaaacatcttttaatacttgattgccgtcaatcgcttttgacagctgccgcagttcaatcattttttttgcctcccttcacatcagcgctgatttcctttatccattcgtgcagtttttccagctcaacccctgcatagtgtgcatcgatgatgagctgtttgagttgctctttaatcatcgtcatcttcccttcaaccagtgtcgtttttgcattctccgatatataggtccctctgccccgcagcgtttcaataatcccctctcgctcaagttctttatacgctttgctgacagtgttcggattcgcaataatgatcgttgccaattctctgacagaaggaagcttatcaccaggcttcatgatccctttcaaacaaagctctttcatttgctgaataatttgttcgtaaatgggtgttgagcttcttggatcgatttgaatcatttacttccctactttctatacgatctgaaccttttatagataaaaatgatcaattatacttttttgccattcaaaaccgatcatcacaagaacaagaaaaaaagaacaagcgatcacagatgccgcaatcagcattggcacgttacgtttgtttcgttttttatgtttcataactgcctcccttaatgtcaatatataaatgattttatattagtgtctatagtgtattacttcaattagtacacttaatacaataaatactttgactcacaaagtcaatcctttttttacaaaaaaacggacccttttaaaagggtccgttttcctacacatcaagagggtgctgcaggatcatattattttgcaaagattgaagctgaagtctcattctgtacagctgttctctctgctgatcatttgacgacagccatagtttattcaaggcatttaccgcatcttctagctgcatttgtgcatcactatattcttgatcgttataatgctcttgtttagaagcgattttcagctgttcttcagcataatcataggcctgcatacattgctggagatgttcatctactgattgtcttgttgccacagtaacccctcctcttggtaatggaaatcatccatcattcatattgtagcctcatctgactttattcaataaagtaatttatggtcgatattcatttgttctcttgtgaaatgcgtgctacaattttaggatgcaatcgtacgcaaggaggcacatgaattgtgatacagaacaatccttttccttattcaaatacggaaaaacgctatcatacattgaattatcatctcagagatcatttcggccataaggtgtttaaagtggcgcttgacggcggctttgactgcccaaatcgggatggcaccgttgcccacggaggctgtacgttttgcagcgcagcaggctccggcgattttgccgggaaccgggccgatgatttaattacgcaattccacgacatcaaaaaccgcatgcacgaaaaatggaaggacggcaaatacatcgcttattttcaggctttcacaaacactcacgccccggttggggtgcttcgcgaaaaattcgaatcagtgctagcgcttgatgatgtggttggcatttcgatcgccactcgcccggactgtctgcctgatgatgtcgttgattacctggcagagctgaatgaacgcacctatttgtgggtggagcttgggcttcaaacagttcatgaacggactgcacttctgatcaaccgcgcacatgattttaactgctatgtggaaggcgtcaataaattaagaaaacacggcatacgtgtctgctcgcatattatcaatgggctgcctttggaagaccgggacatgatgatggaaacggcaaaggccgtcgcagatttggatgtccagggcattaaaatccatctgcttcacctactgaaaggcacgccaatggtcaagcaatatgaaaaggggaagctggaatttctttctcaagatgattatgtgcagctcgtctgcgatcagcttgagatcattccgcctgaaatgatcgtccaccgcattacaggtgacggaccgattgagttgatgatcgggccaatgtggagcgtcaacaaatgggaagtgcttggcgccattaataaagagctagaaaatcgaggcagctatcaaggaaagttctttcagcggcttgaggaggaatcagcgctatgattttgaagaaaattcttccctacagcaaagaactgctgaaaatggccgcgggagaaggagatattgtcgtagatgcgacaatgggcaacggacatgatacacagtttttagcggagcttgttggtgaaaacggtcatgtgtacgcattcgacatccaagaatcagccgtggccaatacaaaggaacggctcggtgacatgtatcaagcgcgaacaacgttatttcacaaaagccatgataaaatcgctgaatccctcccgcctgaaacacatggcaaagtggcggccgcggtatttaacctcggctatttgccgggcggggacaagtcaattacgacaaacggcagttctacgatcaaagcaattgaacagcttctcggcatcatgaaagacgaaggtctgattgttctcgtcgtctatcatggccacccggaaggcaaagctgaaaaaaacgacgtgctcgagttttgccgggacttggaccagcaaacagcccgtgtattatcatacggatttatcaatcagcaaaatgacccgccatttattatcgccatcgaaaaaaaagctcagatcagcaaatgatttgagcttttttctttgagtttttcatccagaacattttttgaaatttccggtaggctctgccgttgatataaaagaaaagggaggtttttccgctggctttgatcagcttctttgcgagccggcccatttccttttggcccgccactttatcatctgacaaataaacgccaagcaagccgcgattgattaaacgatggaagttttcatgcggaatgccttgtaaatgctcgtcagctttatggataaagtgttcaagccgattcatcatctcttcatgagactgataatacgagcagaaattcaagtctccttccagcaagtcctcctcttgatcaatcaaataatcaagaagaatatgaaggccctgtatgtaaggaaaataactgtcgcggatttttttagcggtgctttctgtgaaatcaggctggaacgaatacgcaaccagacagaaaatgcctaacgttgagcctgcacaggctgaaaattcataccattccatctcaggcagctctgattcatattgagtaaaccacttttcaagccgcggaacacgctcatgctcaataacgtgcttatgcacctgcaaatcgcaataatagccgcacagttcaagcagataaggtttaatcatgtcatagtgctcaatggagccgagaacacgctggcacgttttgaccagttcatgcaaatatccgctgtcatcctgttcttccctgaattgataatagttttgcagttccgccccaactgtcagtgcgtcctgcattgaggcatggagcatccgaaaatcctgcgggtccagcgaggtgctgcggtcacacagattgtccaaataatcactaatcgtttgatacgcgatgataaactcgacacatttctgtttttggctgcctgacaataaggccagtatgccgccgccttcacagtgaaacgttttgtcccgaatacttgcggttgcctgtgctttcaattcactgttatgaatcgattctgatttttgcttccatatgtccagctcttgatgaacgagcggaaaaatatctcgatatacctttgccatcaatccaaaaggatgttccggtactgtcaacacatgcaccccctactagttcaaatatattgatcagtaaacgctcttgctgctttaaaaacatcttctctctcgggttcattgaagatctcatggtaaagcccttcccactctctgtatgctttattataagaagcaacaccattaaaccacttgatgaccatcgttttgtcaacaagcttgtcatcaccggcttgcatcacaagaagcggaactttcaaaaatgcctctgtcggcaccattgccgattcaattgtctttaaaagctctctgtaccatctgacagaaactttcctgacgtataacgaatcattttggtcagcctcaatgacgtcctcattgcgcgtcgccatatcaattgataatcccgaatcaaccttaagtgacggagcgatgacattcaggccttttgatgcaagatcaagcgctttattcactttaatttgcagtccgagacacggtgatgataaaataattcccgtaatcttgggatttctttgctgtttaatccattcaatcgcgaccagaccgcccatgctgtgacctagaagaaaaaccggcagatcaaaggttcgcgctttatctatccaagcatctacttcatcaatgtattcttgaaacgagcgaatatgccctctcgctcttgtcgttgttccctgtccaggcaaatcgcccatgacaacgtgataacccgaagaccgccacatttcaatcagccatttatatcgtccatgatattcacttgccccgtgaatgattacaatcacggcaacaggtctgtctgctttccaggtccacatgatcttcacctcatacgaaatttaaatagagaaagaaggatgaatcttatgatctacccttataaggaacacaagccagatatccacccaacagcctttatagctgataatgcaacaattaccggtgatgtcgttatcggagaacagtccagtatttggttttctgttgtcataaggggagatgttgcgccgaccagaatcggaaacagagtcaatatccaggatttaagctgcctccatcaaagcccgaacaagacgctgctcattgaagatgacgccacgataggccatcaggttacacttcatagcgctgttatccgcaagaacgccttaatcggcatgggctcaatcattttagacggagccgaaattggcgaaggcgcttttattggtgccggcagtcttgtcccgcccggaaaaatcattccgcctggccatctcgcctttggccgccctgcaaaagtcatccgccctttgacggaagaagaccgaaaagatatgcaaagaatacggtcagaatatgtagaaaagggccaatattataaatttcttcaacaaacataagacctgcttcgtcttactttaccatttttcaaattatatttgaaagcaataaccatcgttaacccggacgtcataacagttcgggtttcgatttttccataaaacgttcacatatagcatgaaacgtatgacttttatcttatcacaaaactataaacagcctctgcaaaaacacatacctattctttcctgttctctattttctatgagcacacacaaaaagagcccactgggagctctttttgtcagctgatatttcgttcgctggcagctgctgcattttttttgtgaaacccttttccatagtacacagccagcaagatgagaaaccatatcggcccgataatcacggctactcttgtatcaggactgtaagccataagaatgacaacgaatgctagaaatgccaatgacacataagacgtaaacggaaataaaggcattttgtactttaattgtttcttttcttcaggcttcaaacttttcctgtattttatttgagaaagcaaaatgattgcccacgtccaaatcgctccgaacgtcgcaatacttgtaacccaagtaaataccttcgcagggacaacatagtttaacagcactccgactaataaagcgcccgctgaagccagaacagctttacccgggatgccgcctttcgtcagctgaccatatgcttgtggcgcctctttctgttccgccaagttaaacagcatccgccctgtgctgaaaataccgctgttgcatgaagacagcgcggctgtcaacacgacaaagttaatgatacctgcggccgatggaatgcccactttttgaaatgtgagaacaaatggacttccttgagagccaatttcctgccacggataaatagacataatgacaaataaagcgcctacataaaaaatcaaaatccgccaaaatactgtatcgattgctttggctaacgatttttgcgggttttttacttcgccagccgtcaccccgatcatttcaatccctaaataggcgaacatgaccatttgaagagacaatagaaccccttttaaaccatgagggaaaaatcctccgttgttccacaaattgctgattccggttgcaatgcccccattgccgactcctgcaataatcatcaataaaccgacagcaatcatggataagatcgcaacaattttaatcaatgcgaaccaaaattccagctcaccgtaagctttgacagccaggaaattaacacccgtcataatgaccagtgccgataatgcccaaatccagtttggcacgtcaggaaaccagaaccccatatagatgccgacagcagtaatttcggccatacaggtgacaacccataaaaaccagtagttccaccctgttaaatagcctgcaagcggtcccaaataatcacgcgcatacctgctgaaggagcctgcgaccggtttttgaatggccatttccccaagcgctctcataataaaaaacatgaccaggccgcttgcggcatacgctaccaaaataccaggccctgctaattgaatagctgatgcggagccgaggaacaaccctactcctattgcagctcctaaagacattaaagaaatatgcctttcttcgagtccgcggtgcagctcttgtttttgtttttgcatgctttcttctcccctagaaaaaaattcattaaatcatttttctgaatatttcgtatgaattgggtaaaccaatgatgatggagaaataaaaggataacaacaaggctttcgactactcgaaagccttgttgtctgttacacaaagatgacttctttaggctgatggctcagctcttcaggcatataccgtttttcaatattgatgctgtgccagatcataaagattagcacagtccagattttacggctgttatcagccttgtccgcacaatggtcttcaagaagctgaaggacataatccttatggatataagcatccgtttggctttcctgaataatattccgcacccattcgttcatttcgtttttcagccaatgacggatcggtacagggaaaccaagctttttgcggtttaatacgtgctcaggcacaattccttcagcggctttgcgaagaagatacttcgtcgtgccgttcttcgttttcagctcatcaggaatttttgaagcgacgtcgaatacgactttatccaagaacggcacacgcagttccaaagaattcgccatcgtcattttatccgcctttaacaaaatgtcgccgcgcatccaagtgtggatatcgacatactgcattttgttgatatcgctgtacgagctgctttctgtaaagtaagtcttcgtcacatcgcgatatgaaaggttcggattataatgcttcaacagctgctttttgacagactcttcaaagattttagcgttaccgatataacgatcctgaagcggagtgcagccgcgctcaagcaggctcttccctctcataccttcaggcataacggcagcaacgtgcagaagcatctttttcaagccggacggaatccgttcaaacggtttaagcgaaagcggttcacggtaaatgttatatccgccgaagagctcatccgctccttcacctgataaagcaaccgttacatgttttttcgcttcttttgcaacaaagtacaacggaatcgctgccggatcagcaagcgggtcatcaaaatgccatacgatcttcggaagctcattcatgtattcctcaggcgaaatgactttgctgatattttcaatgcccagcgccgctgccgtttctttcgctacatcaacctcactgaagccctgctgttcaaagccgacagagaatgtttttaagcttggatgaaattccttcgcaacagacacaataaaggaagaatcaatcccgccagacaggaacgaaccgacaggaacgtcacttctcatatgaacgtttacagagtcatagatcgcgtctcggacttctttcacaagcttgtcttcttcagtctgaaccggcttgaagttcgctttgaaatacgttttgaatgtgatatcgccgtccgggcggattgtgaactgtgaacccggctctacttttttcacatgggcatcaagcgtgcttggttcaggaacaaattggaaagacatgtactgctgcaatgcctctttatctatttcaatatcattctgagcaaccattaaactttttctctctgaggcaaaataaacctgatcattgatcgttgtgtagtacaacggtttaatgccgaatggatctcttgccccataaagcacatgatcgtttttattccaaatcagaaaggcaaacataccgcgcagtttggacgccgcttcttctttatagtgacagtaagtcgcaagaagaacctctgtgtccgaatccgtgttgaatgtgtacccctttgcttcaagctcttctctcagttcaatatagttatagatttctccgttaaagataatccaatatgtttcatcttcatatgataaaggctgtccgccattttctacatcaataatgctgagccgtctgaatccgaagccgacgtgctcatcatggaaatatccatcactgtcaggaccgcggtgaacgatcatttggttcatttgtttgattagttcttcttgatcagcggtttgagctaacggatgcttgttaaaaaccccgacaaatccacacatagtattgcctccataattaaaattgtcatcattgaacccctatttatagacgctgtgaataatatttggtttcacagttatgtaaaaaaataaacatgaatacaacgataaaaaagggaaagccgcttaaccagtaagcggctataaaattattctcctaacgcttctttacgcagctgctccgctttgtctgtacgctcccaaggaaggtcaacatcgtgacgtccaaagtggccgtacgcagcagtttgtttgtagatcggacggcgcaaatcaagcattttgataatgccggcaggtcgtaaatcaaagttattgcgaacaacttcaatcagtttttcctcagaagcttttcctgaaccgaatgtgttgattgagattgacacaggctgtgcaacaccgatcgcgtaagcaagctgtacttcgcaagaatcagcaagctcagccgcaacgatgtttttcgcaacgtatcttgccgcataagctgcagaacggtctaccttcgtcgcgtccttacctgagaacgcgcctccgccgtggcgtgcatagccgccgtacgtatcaacgatgattttgcgtcctgtaagtcccgcatccccttgagggcctccgattacgaaacgtcctgtagggttgatgaaatattttgtttcttcatcaatcagctcttcaggaacaaccggattgattacatgttctttaatgttgcgctgaatttgctcaagtgtaatttcagggtgatgctgagttgaaataacaatcgcgtcaatgcggactggtttgttattttcatcgtactcaaccgttacctgtgttttgccgtcagggcgaaggtacggaagaatatcttctttacggacttcacttaggcggcgggctaatttatgggcaagtgaaattggaagaggcataagctctttcgtttcgttgcacgcataaccgaacattaatccttggtcacccgcaccaatcgcttcaatttcttcgtcgctcattgtgccttcacgggcttcaagcgcttggtctacgcccatcgcgatatcagcagactgctcatcaattgatgttaaaaccgcacaagtttccgcatcaaatccgtattttgcacgtgtgtatccgatttctttaatggtttggcgaaccgttttcggaatgtcaacatacgtagaagttgtgatctctccgcttacaagaaccaaacctgttgtcacagatgtttcacaagcaacacgcgcgttagggtctttctttaaaatttcatctaaaatgctgtcagaaatctggtcacagattttatccggatgcccctccgtaacagattctgatgtaaataaacgacgatttttactcatgatttgcttcctcctgcacaaggcctcccgaaagaccttgtatatatgatacggaactcgctccctcttatacaatgtacagttatattagagaatgttaattggcatatttatgaaataaaaaaaccttttccatcgaggaaagggtttggtctttgtgcctttcactcttatcgctcaaggaatcatacaaccttgcaacaggttagcaccttggttgtctcactcagttgaacataataaataacagagaaaccggttgctgggcttcatagggcctgtccctccgccagctcgggataagagtatccgctcaatgaaatatcttatcgtaaaagggtttgcaatgtcaatatgattcagaagaaataggcacctatattgagggaaaacaatggaaatgcacacacaaaaaacaataaatagtatagactatttgaaaatatatgttatactaattcacaattagcaaaacacaaaaaacgataaaggaaggtttcatatgaactcagttgatttgaccgctgatttacaagccttattaacatgtccaaatgtgcgtcataatttatcagcagcacagctaacagaaaaagtcctctcccgaaacgaaggcattttaacatccacaggtgctgttcgcgcgacaacaggcgcttacacaggacgctcacctaaagataaattcatcgtggaggaagaaagcacgaaaaataagatcgattggggcccggtgaatcagccgatttcagaggaagcgtttgagcggctgtacacgaaagttgtcagctatttaaaggagcgagatgaactgtttgttttcgaaggatttgccggagcagacgagaaatacaggctgccgatcactgtcgtaaatgagttcgcatggcacaatttatttgcgcggcagctgtttatccgtccggaaggaaatgataagaaaacagttgagcagccgttcaccattctttctgctccgcacttcaaagcggatccaaaaacagacggcactcattccgaaacgtttattattgtctctttcgaaaagcggacgatcttaatcggcggaactgagtatgccggtgaaatgaagaagtccattttctccattatgaatttcctgctgcctgaaagagatattttatctatgcactgctccgccaatgtcggtgaaaaaggcgatgtcgcccttttcttcggactgtcaggaacaggcaagaccaccttgtcggcagatgctgaccgcaagctgatcggtgacgatgaacatggctggtctgatacaggcgtctttaatattgaaggcggatgctacgctaagtgcattcatttaagcgaggaaaaggaaccgcaaatctttaacgcgatccgtttcgggtctgttctcgaaaatgtcgttgttgacgaagatacacgcgaagccaattatgatgattccttctatactgaaaacacgcgggcagcttacccgattcatatgattgacaacatcgtgactccaagcatggccggccatccgtcagcaattgtatttttgacggctgatgccttcggagtcctgccgccgatcagcaaactaacgaaggagcaggccatgtaccatttcttgagcggttacacgagtaagcttgccggaaccgaacgtggtgtaacgtctcctgaaacgactttctctacatgcttcggctcacctttcctgccgcttcctgctcacgtctatgctgaaatgctcggcaaaaagatcgatgaacacggcgcagacgttttcttagtcaataccggctggaccgggggcggctacggcacaggcgaacgaatgaagctttcttacactagagcaatggtcaaagcagcgattgaaggcaaattagaggatgctgaaatgataacagacgatattttcggcctgcacattccggcacatgttcctggcgttcctgatcatattcttcagcctgaaaacacgtggaccaacaaggaagaatacaaagaaaaagcagtctaccttgcaaatgaattcaaagagaactttaaaaagttcgcacataccgatgccatcgcccaggcaggcggccctctcgtataaaaaacaaaagccaagagcaattatgctcttggcttgttttaattgacggaatgcaaagaagtcagcttgtatgtaatgatggtccggccttcttcccattgaagcttctgcacttcagctgtgcctgacttttcgccaaactttgttttgcgtacatccattggaatctccatcggatatactcggtatccgtccttctctaacgtgaatatattttcatctatgcgaacttcttttccttttgtcacaatcagtgtattaaattcaacaggcattcccaaagtgaaatcccctttcgttctcttttttctttatcataacatatttcactgtcagcggtttttcatccattgtgtgagctgccgcacgatacgccggttttcttttggcgggaaataatgtgtgaatgtactgtagtaccacgtctccaccggcttatgcagttgttttagcttctcttcaaataaataggaatgctgaattgaaacattttggtctttttctccatggattaacagcacgggagcctgaattttgtttacttggtcaaacggtgtcctccattgatattcctcaggcacctttttcggtgttccgccgatgactcttttcatcattcgccgcaaatcctgccgctcctcgtatgtaagaatcatatcactgacgcctccccaggaaacaaatgaagctgcctgcccgcccatttcgatcgcagtgagcattcccataattccgccgcgggaaaaaccgaagatgtggattctatccttcttgacatttgggtgctgctgaagcaggcgaaaagcagaaaatgcatcctccctgtcttctcctgcaaaatcctcattgccttctcctccttgatttcctctgtaaaaaggagcaaacaccacaaacccttgggatgcaaactggataatccggcccggccgaaccatgcccacgcttttaatcccgccgcgcaaatataaaaatccgtcatattgtcccggttccgccggctcagccagaagccccttaacccgtaatccatttgacagatagcagatcgtatacaaacgcacatgctggcttggcgacggaaatcttcttttctctacaatcaaaacagccgcctcctttttttctatatgctttccttactccaaaattacatccggagaacctggttaggcattcacacatttttatacccatcatacgatatgtaaagcaaaaaaggatattaacttgatgcgaaataaggaggttgtctatgtgaacagatggttaaggctgagcttcgcctgtgtcggcagtatctttctgatgttcgccctggcggcttgcaagcaggaagaaacgctcacaaaagtcaaggtcgctgaagtgacccattcaattttttacgcacctttatatgttgctgagtctaaagggttttttaaagaagaagggcttgatgtcgatgtgaatacgacctggggcggagataaaacgatgacatcgcttctttccaacggctccgacatcgcgcttgtcgggtcagaaacatctatttatgtcgaagcgcaaggggctaaagatcccgtcattaatttcgcccagctgactcagacagacggaacgtttcttgtcgcgagagaagatgttgaacacttcgactgggatcagctgaaaggaaaaacgtttctcggtcagcgaaaaggcggcatgccgcaaatggtcggcgagtatgtactgaacaaacataagattgacccgcgtaaggatatagacctcatccagaacatagacttcgccaatattgccaatgcgtttgcttctggaaccggtgagtatgtacagctctttgaaccgcaggcttctctctttgagaaaaaaggcatcggccatatcgtggcttcattcggagaagaatcaggagaggttccttatacgacttttatggcgaaacaaagctatttgaagaaaaatgaagacacagccgtcaagtttacaaaggccatttataaggcgcagcagtgggttgaaaatcattctgcgaaggacatcacagatgccattaaagatgaatttgatgataccgacccagacgtcatcgaaacatccattgaacgctataaaaaacagcattcatattcgccagaccctctgcttaacgaaaaagaatgggagcttctccaaaccattatggatcaatcgggagaactgccgaagcacattccatacaatcagcttgtaaataaagaaattgctgaaaaagtcacctcggagaaataggaggcgccatctatgtctttcttacatgtcgaccatgtaacccatacttatttttctattaaagaaaaaacaacggctgtgcgggatattcatttcgatgccgaaaaaggcgatttcatctcatttctcggcccaagcggctgcggaaaaacaacactgctttccattattgccggtttgattgagccatcagaaggcagagttctgattgaaggccgtgagccgaatcaaaaagaacataatattggctatatgcttcagcaggattacttatttccctggaaatctatcgaggaaaatgtgcttctcggtttaaaaatcgccgacacgctgacagaagaaagcaaagccgctgcactcggtctattgccggagttcggcctcatagatgtggagaaaaaatatccgaaagagctgtcaggcgggatgcgccagcgggctgcgcttgcaagaacacttgcgcctaaccctagtctgcttttgctggatgagccattttccgcgcttgattttcagacaaagctgtctttggaaaacctggtattccgcacattaaaggaatatcaaaaaacagcagtgcttgtcactcatgatataggggaagcgatagcgatgagcgatacgatctttttattttcaaatcagccgggcaccatccatcagatttttaccattcctaaggaattggccgcaatgttgccttttgacgcccgtcaggaaccttccttccagacactgtttcaaacgatatggaaggagctgaattctcttgagaaacagcaaagaaaccattgatctgcttcacgagcagtatcaattcaaacagaaaaaggaaaagtggaaggtccattcctttcagcttgccatatttattctctttttctcgggctgggaaacctccagcaggcagggctggatcgatccgctgatcttcagctctccatcagctgtgtggcgattattgctggagaaacttggtgacggttctttactgtcacacatcggcgtcactttatttgaaacggtgcttggctttttgcttgggacgtttatgggcacgtgcctcgccgctttgttatggtggtctaaccgacttgccagaattttagatccgtaccttgtgattttgaatgcaatgccgaaagtagccctgggcccgatcctgattgtcgcgctcggtcccagttttatcagcatcattgcgatgggagccatcatcagcgtcattatcacaaccatcgttgtctataccgccttccaggaggtcgacgaaaactatacgaaagtcatgaaaacattcggcgcaaaaaagtgggttatttttaaagaagtcatactgcctgcatcctcccccgcgattatttcaacactaaaagtgaacgtcggtttatcatgggttggcgtcattgtaggggaattcctcgtttcgaaggtcggattaggatatatgattatttacggattccaagtcttcaattttacactcgtcttcttaagcctgctgatcatcgccatcttcgccactctgatgtatcagggcgtcgagctgctggaaaagaaatggacgaaggggaggacataaaaaacccggcacatgtgccgggttttttattcaatccatccagattctttcagttttttcaaactgatcggaagtacggaatccttcataataaagctgaattttttattgcgggaaaggttctccggaagctcgtgaaacaaaaccgggcctttcgtttcaaagtaatcagcttgcttttcaagcttttctatatctgcaaaatatatatttttcacaatcactttttcttttccgagaactttatactgtccgagatacttgaggcttttgactctcgcgcccgtctcttcctttacttcccggagcgcagcctcttctgcgcactccatcggctctactttcccgcctggaaactcatagcctctgtcctcatgttctgttaaaagccatttgccgccaaaacggcaaatcacccagacatgcttcgggctgtccgagaaaggctgatcgtcaaaggaaagctgaacagtattctgataataatctttaaactcgtacatgtttatccctcaaatccgttcctagctatcttccatacatcataccacagttacgtttcttcggaagccttttatcaaaaaataagggaaacccagcacgccgtcaggttctgcatgcagactagctcgtacagtttttttgcgatagcttttgccgaaaagtgcgaccgacgctctgggctttattatgacccgcgaacagggaaaagttacggtttgcgcttaaatttattttttaacgtttctaaaagatcgacaagcatctgaggaaccggtatgccaagagaactggctgtcacaacaatttgcacagattcataaagaatataaaacataatagccaagtcacgaattgatccctctgtattcagcagctgatcaaaaaagtggcatacagagatcagagccagcgtgactaattttttgacaagccgggcaaatacctttttaaatgacagtttgtgaataatggtttccttcaaagtcgtactgataaattcaattgccataagagagagcaaaatcagaaatgaatactgaaaacctccaaagaaaaaacccgctgctgaaacgctgactgctattaacgaaaagatgccaaagtctctatccatttatcccaacatcctttcacagaaacggccttacgatattctatggaaaacaagccgaacggattggatttttcagaaaaatggactggttgtcgcctatttttcagatacaaaaagaaaagccggacgtcttttttaagacatccggccgttctttttttggacttaacctaggtaagcttttagcatccagttatgtttttcaatattttgatggatcgcaagaagcatgtcccctgttgtttcgtcaccgacttcatcagctaaatccatgccgtttttcagctcttccgcgatgactgtgaaatcatcatatacgctttgaaccatttgttcagctgtttcatttccagccgcttctttgacagaagccgtttctaaggattccttcattgttgcaatcggttttccgttcagcgccaaaagacgttctgctaagtcatcaatataagttgccgtttcgttgtacagctcctcaaacttttcatgaagagtgaagaaatcttttcctttcacataccagtgatagttatgtagtttcacatacatgaccgtccagttggctacttgtttgttcactgcttgaatcaattgttctgacatggtatctcctccttgttatatgactatgtatacccttaatatcgtacgctaaaacctcttttttacccttatctgtcacgatttcttctattatgctacaattgttaaaaaacgggaggtggaatgtcatgacgcttctcattacgataagtattttgattgtgctggctgttttgcttgtaaccatttggacgactgtaaaagcctataatgtaaagcataccattgatccaccacaagaaaatcactctgattcacacaatcaatgatgatgtgaatgttcctcttctgactgattgctggcagcatcggcgtctccgacttggacttttaaggtcggcatgctatgctgtttttttgctgtgacatgggattggacagtgtatacaccatcttccttaaacgtcgtttccaatcggtatacgcctttttcttgtttcgccttaaacatttggcttgcgtctttttccccttctttccatacttcaaactctacttcatcggcatccgtcacagcttcatcaccatatgatacggctgcttcataagcagcgctttctccgggatttactttttcaggcccggtcagcttgacatccaaaacctcgggcgtctcagctgtatttgctttgctttcaccagatccgcatccattaagcaataaagcagaaaaaagcagaacaaccaacatctttttcatgccatcaccctttcatcgtttacctaaatagtagcaaacgcttacagcaaatggtacataaaatatgagacgtcacaaaaaagacctttttgcttatgcgcaaaaaggtcctttctattttagccaaatacttttagcaattcttctttatcctgtgaaagccagaaacgcattaaacgtttagcgccttccagatcatgaagcttcgcttggccgcactgcttttcattcgcagctggtatttctgtaatctctaccgcttccttcattgtgtcttcaagtagatcaacgatttccgctgatgtcggctctccgctcacaactagataatagcctgtctggcagcccattggagaaatatcaatgatatcaaaatgatcgtatttctcagcgtgagaacgaatcgtaaacgcgagcaaatgctcgagtgtgtgaatggtgtcaggcttcatcgcctgtttatttggctggcaaaaacgaatgtcaaatttatttacaacgccgtctgttcctactttatgcacgccgcaatgtcttacatatggagcaacaaccgcattatgatcaagctcaaaactttctactgaaggcataatggcactctccccttttttaaaaatgtaatttcattataacatacttttccgataagaattattgattaacttttcaatctgtgttttttttcttatacttgcatcagaaaggttgctgaagaaacatgaaaaccctattcatcgctctgatcagaggatatcaaaaattcatctcgcccctgacaccgccaacgtgccgcttttatccgacctgttcccaatatggaatcgaagcgattaaaacacatggcgctttaaaaggcggatggctgacaatcaaacggattttgaaatgccacccgttccatccgggaggagtcgatcccgttcctgaaaagaaacaaaaacattaattgttataaccgtttacgataagatccagttttccggttttaggatcaatgactaagccatggaccggaacgttttcagggaacagcgggtgatgtttaataacgtctacgctgtctttcacactcgcttccactgaatcaaagcttttaaaccattgatcaaagtctacaccggagtactttattgtttcgatgcgttcttccggaatccctcttgctttgattttttcaagcatgcttttgctgctgattttgctcatgccgcaatcgtgatgcccgatcacacacacctcatctgcattcagctcgtacactgcgacgagtaaacttctcatgatgcttccgaatgggtgtgtcacaagcgcaccggcacttttaatgattttcacatcaccgtttcgcaaattcatcgcatgcggcagcagttcaaccagacgagtgtccatgcaagaaagaatcgccatttttttatctggaaattttgatgtttgatacttttcatactctctttgttcagtaaatgtcttgttaaattcgagaatatcatttagaagactcatgttcgttgtccctttctattctttttactcttcaatatatcacaacccttgtttattcgtcataataaaaaaagacaaaccctctggtctgccttatttccccatgttatagcgttttttgaactgctcaactcgtccgcctttttcattgaatttctggcggccagtataaaacggatgcgtgtcagagcttacttctactttaatgacaggatatgtgtttccgtcttcccactctgctgtttcattagatgttttcgtagaggtgctgagaaaacggtagccgctgttgacatcctgaaatatcactttgtggttcttcggatgaattccttctttcatgtgaatctcctttcaataaatcgtaataattacgttttattctataaccttacaaacgttttgtcaatcttcttatatccttccctctgttttcacatcgtaaacctcatggcatttaagaataggaagaataatctaaccgaggaagcaaataataaacccaaaatacatacagaacgtctttttagaaaggtggtttacgattgtggatgatttagttttggccagaagcctctttggcacgacaatgggctttcatattattttcgcaacgcttggagtcggtctcccgctcatgattttagtggcggaattgatctatcaaaaaacgaaagatgaccattatgcgatcatggcgaaaagatggacgaaagcacaagccgttttgctgggggtcgccataccgaccggaacgatcgcgggcactcagctcgcgcttttatggccgggatttatggaagtcattggccgggtgatgtccctgccatttcaaattgaaatctatgctttttttgttgaagccctattcatgtcgatttatgtatacgctgcagaccgtttgtcacctgcaatgaggattgttgctgttttctttgtgttagtcggggcagcagcatcagctgttctgattacgaatgttcacgcttttgaaggaacgcccgccggttttaaaattttaaacggaaaaattacagatgttgacccgtgggctgcgttttttaatcctagcttttttatcactgccggccatgtcgtgctgtccgcgtttatgaccggtgcatttatcgtggcttctgttgcggcgtataaaatgatccggacgaggaaaaaggaaaaggtctatcgctttcaccggaaagcccttttgctcgcactgacgatcggcggtattttttcattgctgaccgctttgaacggacacgaatctgcacagatgctgtacgaataccagcccgaaaaattagccggtgcggaaggcctgtttgaaacaagatcccacgccccgctcgctatcggcggttttaccgacccgaatgaagaaaaagtaaaatgggcaatcgagattccatgggctttaagctttttggcagcgaaccgttttgacactgttgtaaaaggattaaatgcatttccgagagatgaatggccgccgcttttcattcacacgctgtttaatgcgatggtcggtgtaggcatgctgcttattctttattctattattggtgtggtctggagaaaggtgctcaagaaagaccgtttcccaacgtggcttttggtcattttcatgacagcaggcccttttagtctcatcggcattgaattcggctggattttcgcatgtacggggaggcagccttgggtcatctatcatttgctgaaaacatcggatgtcgtaacaacgactggttcgatcggagtgctcttcttgtttttcacatttgtttatgccgtgttaggcgctgctgtcgtctacgtgctgctgtactatttccgcaagcacccggttgacgaagatttaaatacagcggagtcgtaatggctccgcaaacaggaaaccaaatggaaggagatcgacaaatggagatttcaactgacgctctgatcgccatctcaattatctggggctttgtgtttatttacgccgtcatggcgacaatggattttggagcgggattttggtctatgatctatttaaacaaggagcatatgaaggccaccgatattgcgaatcgctttttgtccccgacttgggaggtcacaaatgtctttattgtggccatcgtcgtggcgcttttcagttttttccccggcgcgacatttgtgctcggcaccgttttattaattcccggaagcatgattttactgcttttagcgattcgaagcggatttctcgtgttttcaaatacagcaaaggagcggaaaacgctaagatatatttccggcatctccggctttatcattcctgctattttaattttggtgcttcctgtgacacacggagggtttatagaaaaaacggatggaatctataacttaaatatgtctaaaatcttttcaagccccaacgcctattcatttatcgggtttgcgattttaagcaccttatttttgtcctcgctgctgcttgcagatgtttcaaatgtggcagaggaacaggatgcgtaccgagcctacagaaaaagcgccctgattaccggcccgatttcactgttgtttgcagtatgcattatggtgacaatgcggaatgaagcaaactggctgtacagcggaatgatgaatgattttacttggattattgcatcgttcattacatttgtcattgctggaatcgccctttttctgcctaataagagctttgggcaaaacatcggaaaaccgcggcttgcacttgtcgcgattgggatacagtattttctcgcaagctacgcgtacgggcgggcgcatcttccgtatatgatttatcccgatgtgacagtcatgtcaggcttcacagagccagcaacgttcagagcgctgtttgcaacgtatatcgttgcatttatcattctatttccgggcttctttttcttctggaaaatgtttatgcgagataaacgctatatccgccaggaggaatagagggcaagccagccggctatactaatccagaacctttataaggaggggatggcatggagcagaaaattctatgtgaggtcaacaactgttcttattggggcaaaggtaacaaatgcaccgctgatgccatttatgttgtcagccatactggtgaaacggctgaaaacagccgggaaacagactgcaaaacgtttaagccgcatgatttgtaattaaaagaaagagctgcatcagccagctctttctttttgcatgttgagtgttctcagctttttagttatgaccccgtttgcaggtgaaaacaaaaaggcgcttgcataacatacacctgtcatggccgccatcgctcctgaaatcgaaacattaagccacgttgcgaagaaatagcccatgaccgccgacagcccgccaatcaacgcgctgagaatcagcatataaagaagccggtctgtcagcaaatgtgccgcagccggcggaacaatcagcatggccacaaccaatacggcacccaccgaatcaaaggaagcaacagtcgtcaaggacagcatgcccatttgcacgtaatgaatgagcaaaaccggtattcccaaggctaaagccatttgaggatcaaacgaagcgattttaaactccttatagcacacactgatcaacactacgtttaaaaccagaacagatgccagcatccaaaacgctttcggcccaatatcaaccccgaataccgtcaccgtattccacggcacaaaagcgatttctcccattaacgagtgctcaatatcgagatggacattcgctccatacacagaaagcaaaataaccccgattgcaaataaggatgtaaacacaactcctatggcagcatctgattgaacccccttgctatgaagaagctgaaccaagaaagccgttaacagaccggttgcggctgcgccaataaacatataaatcccatcgagacttcccgtcactagaaaagcgccgacaatgccaagcaacactgtatgactgattgcgtcggccagcatcgccatgcttctcagtacaagaaatgtgccgatcaatccgcagcttacaccgactaatacaccggtagctataatccatgcttcaaaactcattcgcgatctgtcccttctcggcatcatgagacacttttcgaagctcaggcatccgtccatacagctttaagagtgaataaagccgctctctcgtttctctcggtaaacggtccgggtcaaagtagtcctgatcggattctatattggcaagttccatttcatgcatgagatacacttcatacatccgctgcttcaaagctgtgtgatagcctttttcaatccctttgcttgtgatttgccaaatcccattttcgatacgctcaatgcacctctcttgttccaagtcatttaatgccttaaggcataatgaaggggataggcgtcttttctttcttacactttcaacagttacacaaagatttttcttttcatactgttcataaatcgccaaaagcacttgctccctgcttgttctgcgccgcagcctcatcagccttatggctttagcagccaatccccgcttaggcgcgcaaatcattgaaaaaagaaagagcagcgttgcagataagatcattaatggccctgtcgccattcccttcatcgtggtgctaagcagggttccggccactccgctgaccccgcctgtaatcccggcaatgatgatcatcccggttaatcgttcggtccaatatctcgcggttatggcaggtgtaatcagcatagccgccattaatatcacaccaacagtctgaagcccaatgacgacagcacagacaatcagacaagccaaaagcccgtttaaaaaacgcaccgggattcctaatccctttgcaaacgcgagatcaaaagtaatcaatgtaaattccttaaagaaaacaatacataggagcagcagagcagcggatatccctgcaataaggatgatatcctgcctgaccaatgaagcagcctggccgaataaaaaagaatcaagcccgctttggcttcccgccccctgttgctgaatatatgtcagcagaatgatcccgacgccaaaaaacacagaaagaacaatcccgatcgccgagtcctcctttgtttttgaaagccgaggaatcagctgaatacaaaacgttccgagcagtccggcgagcgctgcccccagcaaaaagaaaggcagtgatttttgcccggtgaacagaaaagcgagacacactcccggcagagctgaatgggccatcgcatcgccgattaaactttgctttctcagcagcacaaagctgcccaaaacaccgcttgccgtcccgagcaaaagcgtaccggccagcacccactgtgtattcggatgctgaagctgcagccacaaactttcaaacattgcgctcactccttatgtccttctgccagcactttatcttttaaaaacgtaagccttcctccatatgttttttgcaggttttcgatcgtaaaaacgttttccgccggtccgaaagcgattttccttaaatgaagcagtaagatccaatcgaaataatcctcggcggtctgcagatcatgatggacgacaagcacggtttttcctttttctttgagctctgccaacagcgtcataatcgcgcgctccgtcgctgcatcaacacctgcaaacggttcatccataaaataaatgtcagcgttctggcagagtgcccgggcaagaaacacccgctgctgctgtccgcctgacagctggctgatttgcctcttcgcataatcatgcatcccgacttttgttaatgcggccttcgccatctccacatccgctttctttggcctctttaataaaccgattctcccgtatcttcccattaggacgacatcgagcgggcttgtggggaaatcccagtcaaccgagccgcgctgcggaacatatccgattctggtccgctgatccttatagtctttgccgtaaatagagatgtctccggaagctctgggcacaagaccgagaatcgttttgatcaaggttgattttcccgcgccgtttgggccgataatgccaataagttttccttcaggcacctgcagcgaaatgtcctgcagtacaggctttttatgataagcaaccgtcacattatcaagctcaacagggaacatatcctccacctcttttctttatttaagcgctttagtaatcgtgttgatattgtgacggaacattccttcgtatgtgccttcttttgtgcccttttcacccatggcatccgaataaagctgaccgccgattgtgactgtatggcctttttctttagcgccttccaccactgcattgattgatttttcagatacactgctttctacgaacacagcttttatttgtttttctgtcagaagatcaaccagctcctgaacatcccttaatccatagtccgaatctgtgctgagtccctgcaggccttttaccttaaatccatactcattcccaaagtacgcaaacgcatcatgagcagtcacaagcacacggcttttctccggaatatgtgcgatctccttacgcgaccacttatctaaatattgcaaatcttctttgtactctttggcatttttccgaaaggcatctgcgtgctgaggcattgctttgctgaattgcgcttcaatttcatccaccgcatagatccataacggaatgctgaaccagacgtggggatcaaacgtcttgccttcccccgcgggaataagcttatttttcggaatggcctcagctactgccgccgattgtttttgttcgccgattttttggaggacatcctccattttcccttccaaatgcaacccgctgtacagaacaacatcggcagacattaattttttcgtgtcaccttgggaagctttgtaaaggtgcggatcaacccccggtcccattaaagaggtgacttttacatgcttacctccgatgttttctgctgcatcggcaatttgagatgttgtcgctgtcacttgtaattgctgatcagcgctttttccggctgaatccgttccgcatcccgttaaagcaaaggtcgcaaaaagtactgctgccatcagcccttgtctcatatttctcctcctctttgccatcaatgtccgattgttttatcttatgttgtcagttcttagacatgtgacattaaattagccaaaagcatgttttatttacacaggacaaaaagtttcccttatgcaaaattatcgcgtttggccatttttgtcaagctgatttacataaaaaaaccggctgggtcagcagccggtccaaacgagaagggatgtattcaacgaacacttttactgtaacagcacagtgtcatttattcaaaatagcaaaatgcttttttcttaaccatgctgtgtgaaaacatccattttggtcacatattttcgcataatatcttggtttacctcaacccctaaaccaggctgttttgacacagaaataaatccattatcaatacgaatatcaggagttacaatatcttcatcccaatagcgtgaggatgaagatatatcgccaggtattgtgaattgaggcagtgaagcaagcgccacgttctgcgctcttgatatgcctgtttccagcattcctccgcaccaaacctgcatatgatgctctttgcataaatcatgaatttttaaggcttctgttaagccgccgacacgagaaggttttatattaataattttgcagcttcctagctcaatcgcccgtctcgcatcatcaactgaacaaatgctctcatcaaggcaaatggccgttttcaaatgtttctgcaagtggcggtggtcaacgatatcgtcagcttggagcggctgctcaatcatcattaaatgatagtcatcaagctcctttaaacggctgatatccttcagttcgtaagaggaattggcatcggccataagcgggatgtttgggaatcggctgcggatggccttgaccaattccacatcctgcccaggctgaattttaatttttattctttgataaccttctttttgatagctctcaatttccttcagcatatcgtcaagaggcgccaggccgactaccaccccggcagggactttatctcttgttccgcccaatgcctcagcaagggatacgcccttctttttggcataaatatcccatacagccgattcaagtcccgcttttgccatccggtttcctttataccgcgccaggctgtccggcacttctgaagggtgattgaattcacggccgacgacatttgggataaaaaaatcttttagcatatgcaaacatgttccaatggtttcctcggtgtaccaaggcgaagagaaagcggaaacttctccccagcctgtgacacctgatgtatcaatggcttccacgatcagaaatttacgctcttgaagcgtttcgatactgtttttaaacggtttctttaagttcatgctcaaatggtaaagcgtgattttttctatttcgatcatagcagttctcctttacgcgcatccttcagctgatttcgcaagagcttattagacgcattgcgcggcaggcggtcaagcacaaagaattttgccggaattttatacttcgccaagcgttctttgcagtagtcagtcaattctcctgcgctcacaggcttgtgaaggacaagataggcgtgaggcactttcccccattttttgtcctcagcccctgaaaccccggcttcggccacagcggggtgtgaaagcagtactgactccacttcggccggataaatgttttctccgccggatatgatcagatctgaacgtctgtctaatacatataaaaagccttcattgtccaaataaccaagatcacctgttttcagccagccattttgaaaggaggcttcgtttgcgctctcccggttaaaatagcttttcatgacattcgggcctttgaccatgatttcaccgtgttcatacggttcacatacctgtccgtcccgctctattttgatttcacatgaaaacagcggtttccccgcagatccgagcttttccatactgaattccggcgacagggtaacaatttgtgagcatgtttctgtcattccatatgactgaaagacagggaatcctttctcacggcattcctcaagcaatggcagaggtgcagggccgccgccgagaagaatgcatctgatggattcagggcagcggcttgtttcttccaaaagactggccagcatagtctgcaccgcagatatcattgtcacttcatgcctgttgatagaattcagcacatcgcttacggaaaaacgctggtgaagcacgacagtcattccatagatcacagatttaaataatgcggacaatccgctgatatgaaagagcggcaatgcgataagccagcggtcttgttctgttatacccaaattaagcgcggacgacaccgcactgaaatagtggtttccgaacgtttgctgaactcccttgggctttcctgtcgtacccgacgtatacatcagcgttgccgttgcatccatttgcatataagcctcgatctcaatttcctctgctgcttctttcatcagttcatccacatcaatcgtttgaacgatgtgttgatattctttcttctcaaagcttgaatctgtcaataaaaagccggatcccgaatcctccagctgaaacagcctttcatgtgttgacagcttcgtattcaaaagcaccgccttaacaccaagcaaaaaacaagcgtgaacagcgtataccatttctgcacggttttggagcaaaatagctgcagtatcccctttccgaaccgaatgagcggcaagctgttccgccattcgtttagacgcggcaaacaattctgcaaatgtcacggtttggtcttcatagatgagagcgattctctcaggtgtcagctgtgcccgctgcatgagccagttgggctgttctgtcagcatgtcatcatctccgaggtaaaatgtctgtattgaaaagaaaacagcttggaccgcaaagtctcaagctgttggtttactaggtattgctgatcacggaaaacgagggaactgtccgaaatcaggtttgcgtttttccttaaaggaatcacggccttcttttgcttcatctgttgtgtagtaaagaagggtagcatcccctgcaaactgctgaattccagcaagtccgtctgtgtccgcgttaaacgcagctttaagaaagcgcagtgcggtcgggcttttttcaagcatttcttcacaccatttaatcgtttcttcttcaagctgttccaaaggaacgactgtgttgacaagacccatgtccagtgcttcctgtgcgttgtactgacggcataggtaccagatttcacgtgcttttttatgtcctacaattcgagccaggtagccagaaccgtaacctgcatcgaagcttcccactttagggcctgtttgtccaaaaattgcgttgtccgcagcaattgtcaagtcacatacgatgtgaagcacatggcctccgccgatcgcatatccggacaccatcgcaacaaccggtttcgggatgacgcggattaaacgctgaagatccaatacgttaagacgcgggatctggtcgtctcctacatatccaccgtggccgcgcactttttggtctccgccagaacaaaatgccttgtcccctgcaccggcaagcacgataaccccaacgttttggtcgtctcttgcgtcagcaaacgcatcaatcatttcagcaaccgttttaggggtaaacgcattatgtacctcaggtcggttgattgttatttttgcaatgccattatacgtttcatacaatatctcatcgtatgtccgttttgttttccattcagccatatgatgacctccttttattctctatgtgaatgagtcagatgcttgtcaaaaactcactcactattttaccaaacaatcgcggctgttccacatggaccgtatgtcctgcttttggaacaatctctattctactagaaggaagcatcttatgcacctcttgattgatggcgcaaaatttttcgtcccactccccgcagataagaagcacaggaacatctatttcctctacacggctccacaaggaaggctgtgaaccggtgcccatgccggttaaactgttcgcaagcccaatcttattgttccgcagacggcccgatcgtatcctgtgccgaatatcttcagccagcctctgctgagatgaaaacaaagggatattctcccaatacgcaacaaacgctttgagcccgtctcgtaaaataaaatcagcaagcttccggtcccgcatgattcgttcccgccgttccccaagtgttttgagccccggcgtcgtgctttcaagcacaagtgccgatacccgctcgggatatgtcatcgcgaaagagtaagcaagccttcctcccatagaatacccaatcaatttcactttgtgaagttttaattgatcaaaaatctcggcaaggtcagaaacttgccggcttgtgctgtatcttttcccattcagcggggcatcggtttccccatgccctaaacaatcaattttgatcaaacgggaatcaggcagcatttcatcaagaaaagtccatgattgtttgctgccggtaaacccgtgcagacagacgacggcttcggaagcattcggtccctcgtctgccactgcatatcggacaccatctgataccgttatgtttacagttcccattgttttttcacttcccgcacagcctcattcagcatatcgcgatgaagctggactcttgattggcgatccgttttgatttcaatcaaatggagtccgggcttgtctgcctgcggcgcgtaagctgttttgaattcatcccaagaagccgggcatgaatacgttccgccgtaaagtgcagcggcatgcttgaaatcgagccctgtcggtgtgccgaacaaatcttcaaagtgtgtcttctcagaagcctgcggcaaaaaggagaaaatccctcccccgtcattattgacaagaatcacagtaagtggaatacccagctttttggccgccagcaagccgtttaaatcgtgataaaaagataaatctccaatcacaagggtaacaggcgcttttgttccttcacatacccccatggcagaggagacgacaccgtctatcccgtttgctccccggtttgaataaatccggaaagggcggtcctgcttttcgaaaaacgtatcaacatccctgatcggcatgctgtttcccacaaacagcgagctgttttcaggcacaagatgctgaaggattcgatagagattgccttcaaacgaaacatcttcactgctgattgtttgcagatgctcgcggaaccgcccattgacaaactgccacttttccagccactctgaggatctggcagcagcagtaaggcctcccatgatctcctcagcaaaaacagacgcattacaatgaatcatatgcgcgcttgcctgtgtcgggtctctccaccctccatcctcgtcaatcactatttgctgaatcgcaggatcatccttaagccataagaaaaccggttttgaaacaggcatcggtccaaaccgaatgacaacatcaggacgaagtttccgcttcagctcatcatcttttaaaaacgaatcatacgcatcaataacagtgcttttatcatgaacaccattccgcagattagacagcggatccgctaaaattggatactgaagcgcttttgacagcgcaataatgttttccttatccgcatcactatggagctccccgcagacgatcattcctttttcagcctctgcgagcatctcagccacatcagacagggactctcggtcaacagactgcgtacccgttttcacagacacatgacggcctgttctcattcttccaaacggctcatctgaaagatccggcatcagcggttcgcgcagcggcacattcacatggacaggccccatcgggcgcttttgtgcttctccggcagcgcggcttgccagcgttcggatgtatctcagcatttgcggagactcttcaggaagagcagagtctgtgaaaaacttaacaaagttaccgaataagaagtgctgattaatagcctgcggtgcgcctacttcgcgcagctcatgaggccgatcagcagttaacacaataataggcacccttgaataatgggcttcaaccacagccggataaaagttggccgcggctgttccagatgtacagatcaatagtacgggacgctgcttcgcttttgccaaacctaaggcaaaaaacccggcagatctttcatcaatttggacatggacgctgatatcgggatgcgcagcacaaagaacagccagcggtgtagatcttgagcccggacaaacgacggcgtccgtaattccggaaagggcgaattcatcaataaaacttccgatgtaatgagtaatcgggttgactgtcaacgcctctcacctcctaatgcagagatcatcggcttcaatttaatctgtgtttcttcatattccgagattggttccgagtcttccacaataccgcacccggcaaacagccttgcagtgcttccttcgatcagccctgaacgaatggctaccgcgaattccccgttatcctggctgtcaatccagccgataggggcagcataccagccgcgagacatcggttcaatctccctgatcacgtcaacagctttttcctgaggtgctcccccgagcgccggagtgggatgcagcttctcaattaagtcaaaaattgaagcagactcgcgcagctgtccgacaatcggcgtaaacaggtgctgaacgctttttgttttgtacaaaacaggtccatcaggcttttcaacctctgaacagcttgatacaaaagcattatgaatcatacctaccacaatatcatgctcaagcaggtttttctcatcgtttaataattcaaggcctatccggcggtcgtcttcttcattcacgcctcgtttaatggagcctgccagacaggaagacatgacagtgccgccgtctcttttgatcagtctttccggagacgcgccgacaaaggttttgccttcttgttcaattgcaaaaacatagcttgtctgctgatcgtccagaagcgttttaagcaccggttcaatttggattggaccgtcaaacgtgagcagcagctctcgggcaagaacaaccttatcatattgtttctctttaatttggcttgtggccgtttcgattgctttcagccaatcatccttatccagctcttcggctgctgcaatcacagcctgatcttcttgcttgaaatcgggaaccataaattccgccgcaaaagcttttaagccttctaaaacagcttctgcgtcttctcctccgcttacccatctgttaactgttaagaacgggccttcagcagtcatcgtcagcataagcgcaggcacaaagaaatccccttccgagaaatggtcccattgtgaacctctttcttcgcaagggtcaaaagaaaatcctccgaataacacaggtcccactgcagaatgctgcagcttttcttcttcataaatatgaaaagccgtctttttaaagcgctcccattgttcaaaaacctcacgataccgctcgctgtttttttgatttgtctggaaaaccgcttctttgccaagaccgactattgtcaattcactttcaggatctgaccaaaaaaatcgattgcctgtatatttttttgctccgtaattgaaaaatgatagagggtcaagagactcgatttgtctcgaatagcttattaagacagcatggttgacttctttggctttatgtaatgcatgtagaacttcctttcggaacgtacgctgcaccgttgtcaccatgagacattcctccataatccttaaaatgcttttaataccatacacctgtgtctcctttgtgtcaaacacagatcatgcagtccaaatggcctgccttacctattataaacctaatttcagaaatgaaaaagaaacaaagcttaaatttctttctccactgatagcaaaggttgtatccgcttaccataaaaggaaaacctcctatattcctccacccgccatttatgaaagttctcaggcgatctgttcatactaaaggtatgcatcacagagaaacgaggcgatcacattgcttacgaaagaacagcttcagcatttaaaaaatgaactggaacaaacgaaaaaagatatcttaaaccgtttcaaagacaatgaccattttcagcttaactcagcctttccttatgattcgtggggtgagctttcggcatacgacaaccatcccggcgatcaggcgacagaactttacgagcgtgagaaagacatcgctctagacttgcatgagcgagagcaccttcgggacattgagcattcattgaaggcgatagaaaacggtacgtatggcatttgtgaagtcagcggaaaggaaatccctttcgaacgacttgaagcgcttccgactgccacaaccctcgcggagtattcgtcacaggacgtggtttccaaagaccgtccgattgaagaagaaacaccattcgggcaatttgaatttgatgatgatgaagaaatcagagcgccatatgacagtgaggattcctatcaggatgtcgaaaaatatggtaactcacaaacgccgcaggatatggaaaaccctccgctcagctatgatgatatgacgatgaataccgaagagaatatcggcaatacggagtcttacgaaaatttcatcgctacagatatcactggaaaagaaattaccgtttatcaaagcagagcccatgagcgctatgaagaagaacttgacgaagagggaatcatgaccacattcggcgatctccacgctgattgaacccccaattattgggggttcttttccgttttcagcatatcgtaaatcagcttcagataatccttttgcaggccgatgtcataccgctcgccctctagcaatttcccgtatacggtacatgccccgagcgaagcttttatcgcatccgttacctgcacttctcctccgctatcagcttctaatgcctccagctcattaaaaatatccggtgtgaaaatataacgccctgctgcggcaaaatgagacggagggttttgtttaggcttttccacaatatcctgtatgcgataaagccctttttcaacaggctccccttttatcaccccgtaatgatgtaaatcctccgtttttgtttcttttaagccgatcacactggactgatatttcgtatacgcttcaatcagctgccccaaagccggctgattggcggaaaaaatcagatcatctggcaaaacgacggcaaaaggctctccgcctgcaaattgctttccgaaagaaatggcgtcgccaagaccctttgcataaggctgccgcacatagtgaatccgtatatccggaatgggatgctctctaagtaaatgcagtttattcttagaggccaaaaaagcctcaagtgccaaagaggaatcaaaatagtcgacaatcagatttttatggctcgatacaaccatcaaaatgtcctcaatgcctgactcctttaattcttcaacaagataatgaatcacaggcttagatcctaccggaaacatttctttcggaatcaccttcgtcaccggcagatttctcgtgccgaatccgcctgcaggaataatcgctttttttatcatggtattttcccctcagctcatgtttattacatgatattccaagagcgcatcccgatgtttgtacatctgaaattaggcggaagcaactgggcagaaagcggaatcacgaaccagcccttttttaataggatattgatatatgaccagtaatcttgtaaaggagctcaggtgatgaaaatttgtgtggttggcgccgggtatgtcggtttaaccctatcagcggcactggcatccatcggacatgacatgatatgcacagacaaagacgtcaaaaaaatcgggcagctgaaaaaaggagtcattcccttttacgagcctgggctttcagatgcaatacttcgttgcggcaatctctcgttttcttctgaagtgaaatcgagcatggaggaatgtcccgttatttttatcgcagtcggaactccgccgcgttcggacggatcagctgatacgaaagccctgcagtccgtcatcggtgatttaagcgaggcgatccgatcgtataaaaccattattacgaaaagcactgttccgcccgggacaaatgaaaacatagcaaaacagctgattgcctccggagtgtctaaaaacctctttaatatcgtatccaatccggagtttctgcgggaaggcaatgccttatatgacatgctgcatcctgacaaaacagtcatcggtgttcaggaagaagatcacgtatcggcagccatcgtcaaatccatttacaaacacattgataccccttttatcgttacaagcttagcgggagcagagctgatcaaatatgccaacaatttctttttagcggccaaaatttcgtttattaacgaaatggcccgcatatgtgaagcctatcaatcagatatctcagatatttcccgcgctatcggtctagacccaaggatcgggaagcactttttgcaggcaggcatcggatacggaggctcttgttttccaaaggatctgcaggcgctgcaatttgctgcccaggaaaaaaacacggagaccttcctgctccgggccgtgcagcacattaatgacacccagctcggcctgtatatcaaaaaaatacagtcattcttcgaaacacttcaaggcaagaaagcggctgtactcggcatttccttcaaaccgaatactgatgacatcaggaattctcaggctgtcagactgatggaaaggctggcggagctgggatgtgatgttcatgcatatgatcctgaagctgtacttccagaacatttgcggaagcatgtaactcagcattctcaagcttttgatgcgatcgaagaaagcgactttttatttttggcgacagaatggcccgagtttttagcgtttgattggaaaaaggctgcagatatcatgaaagggcgtcttgtgatagacgggcgcaacgtactgaaaaaagaactgatcgagacttgcggcctgatctgtacgggagttggccgtccatgaaaatactcgtcacaggagcagctggctttatcggctcccacctctgcgaagaattactaaaagataagaaacataacgttatcggaatcgatgactttatcggtcctactccattttccttgaaattaaaaaaccttaaaaacctgctgccggaaaagcgatttacgttcataaaggaaaatctgctgacagccgatcttgctcccttactggaaggagtggacgtcatctttcatttggcggccataccgggtgtccgctcaagctggggcaatcattttcacccatatgccgcacataatatccaggcgctccaaaggctcctcgaggcgtgccgggaacattctattcaaacgttcgtctttgcatccacctcttccgtctatggcgaaaaacaaggaaaagtcagcgaaaacacgtcgctttctcctttatctccgtacggggtaacaaagcttacgggagaaaagctttgccatgtgtatcaacagagctttggtattccaattgtgattctccgtttttttaccgtatacgggccaagacagcggccggatatggcttttcaccggctcattaagcagcaccttcagcaaaagccgcttaccattttcggtgatgggcagcagtcaagagatttcacttatatcggcgactgtgtcaaaggcatcaccgctgttcttgggaaaccccaccttattggtgaaacagtaaatatcggcggcgcagagcgtgcctcagtcttaaaggttgtctccctcattgaggatatttccggtagaaaagcaacactgcacttttcggacaaaatagcaggggaaccgagcaacacgtgggcggatatttcaaaagcaaaacagctcttgcattatgatcccgccacatccttaaaggatggcttgaccaacgaaatcgcctatttatcgtcgctgtatcagggggaataaaaatgaagcttgcctttatctgtacagaaaagctgccggcgcccgcagtacgcggcggcgctattcaaatgatgattgacggtgtcacgccctatttcagcagcaggtacaacctgaccattttttcaatagaagatccatcgctcccaaaaagagaaacaaaagacggcgtacattatatccatctgccaaaagaacattaccgcgaggcggtagccgaagagctgcgagcctcttcctttgacctcattcatgtgttcaacaggcctttaaatgtctctttatataaaaaagcctcaccaaacagcaagatcgttctgagcctgcataacgaaatgttttctgaaaaaaagatgaccttcgcgcaaggaaaagaagtactcgacaatgtctccatgatcacaacagtgagcgaatttattaaacaaaccgtcattgaacgtttccctgaagccgaggacatcacaaaagttgtgtattccggcgttgatttaaactcttatccgcccgtatggacgatgaaaggctcggctgtcagaaaaacataccggaaaaaatacggtattgaagataaaaaagttattttattcgccggccgcttaagcccgataaaaggacctcaccttctcattcacagcatgagaaggattttgcagcagcaccctgatgctgtactggtcatagcgggcgggaaatggttcagcgatgacagcgaaaaccaatatgtaacctatctgcgcacgctggcgctgccatacagagaccacataatctttacaaaattcattcccgcagacgacatcccaaacctttttctgatggcagatgtatttgtgtgcagctctcagtggaacgaacccctcgcccgtgtgaattatgaagcaatggcggccggcacgcccttaattaccacaaatcggggcggaaacggagaagtcgtaaaagacgaagtcaccggccttgtcatcgacagctacaacaaaccttcttcatttgcaaaagcaattgacagagcctttacagatcaagaattaatgaacaaaatgacaaaaagcgcccgaaagcatgtagaagctttatttacctttacccatgctgccaaaaggctcaatactgtttaccaatccgttctgaccccgaaaaacaaacaatttccgccgccttttctgacgcaaaattttgatttatcatctatcaatcagctttttgtgaaagcaaaaacataaaacctacagctcgtgttgcaaaacgggctgtttttttgctgcagaaaacataaaaaaaggcataaatgtgactttatgccttgcgctttacggtttgagaaaaccatggagctggtttagattcacttggaagaatgatgatttccactttagcttcttccgctaagtctggttcttcatcttcatcctcttcttcatatggggacactgagcgtttcgaatcacgctcctcctcaggctctagaatggtttcgaatttcgtttcttcttcatcatcgacgattttgtgatctgtttccttttccttcgtttcttcttgatattctttcggtgcattgatgtgagggagctctcgaatgctgcccacatctaaatgcttctcctcttcttccttctcagctgacattgagtcatgagcctgccaccccatcggcccaggcggtgtaaatacgaattggtcgagatccagtttagaaatagaggctttttgtctcgatgacctcatgtcaattcgcctcccgatacgcttttatctttttatacagttccggcagtttatccaaaaacgaatctttagattcttcaacagaaatcatgttttgcagcgcccagttatatttctcatctgaccacgttttcttttgcttcaaataatatttgtgcccgattgcacagaacaaatgcggaaacgcgagatcaatccaaagtacctcgtactgtttttctgtgagcggatacactgcgtcgtaggccgcaagcagtgcgaccatgaaatcagtatcccatacagaaagcttaaccatcactttattcagcagaatacgaaggtctcttgacggcaaatcgtaggtaatcgagtgaagctcctttaaaaaaggctccccttcgatctctgtcaaacgtgccaatgtaaaatcttgaaaacagaatccgccatgctcgagcgtttcttttgtccaggtttcgtattctgagtcatcaagcgcctgaagagcttcttttcctcttgccagcattttatcagcatgttttaagaaagtttgcgaaaatacgtcatcaggataggatgccgcgatctgcatattcccttcaagttcctgcagcttccatcggtacaatttatgccattttcccagcctgcttctcttcttgctttcatctgtgcaaacatatccttttgaggcatgatgaaaatggccggcaaatgacatgacttttttcatttgctctgcatcatagtaaatcatttcttttcctgtcactttgtcatataagctgtaagaaacctgatccgtgcccaagcagctcccgccattttttgtttgatgaatcggcgctatcggcagccctttctcttgtaaatgagcgtgtgcctgagtgataaaaagcatccgctccggtttcatttgcgcttcttttagcagctttgggccatgatcagtttcgacttcccagattttgcgcccgcttttgttcgatttcagcgccacatggtcgatatgaaacggataatagctgagaatttcggacacaatctgttcttcatgctctttttggtacactctgttcaccccttctatctgttcttttcatagacgctgagcagattttcagccaccctctgccagccaaaattgctttctgcctcacggcggctgtatttcccaagccgttcccgcttttcagagctgctcagcaaatcattgatacgttcggcatattgtttaggattttcaaagtcatgaatgatgtagccgtttttcccttcctctatgacctctggattgcctccccgattgcttgtgataattggaagtcccgcagccatcgcttcataatgcacccttgctaaaggctcctgccattgcgaagagcatacaaatacatctgacatggtataaaggcgcggaatgtcctttggcttcacaaattgaataaatgtgacatgatccttttgcatcgcaccaagggtatgaagatgtttgacatagttatttaattcattatctccgaaccattttgacccgataaacaccatcatgacatcggggtgctcctcaatgatgtccggcaaagcctgcaataatatgtgcgggcctttgactttgctaagccggccgacaaacaagacgatttttttgccgtgaagccccagctcgcttcgcatctcttcgcgagctcgctgcccttcattcgtccagcgagggtggtacgtttttaaatccacaccagaatacaccgtttttgtttttgatcgtgctgacggaaaacggcttgtgatcgtctgtccgatataatcgctgaccgtaacaatctgcgctacggagtcgatgcaaatctcgccttccgcctggctgattttatcgtaagcgaacatttcattgtgaacgcttaaaataaaaacagcatccggcgcctgtttcttcaatttcggaacccagcttgggcgattacaaacatgcacaagatcaaaacggctctttttcagctctgctccaacggcttcttcataacggtcttcatccaaatgcacataatggacaccgtctaccttctctctatcagcgagattcggatctttaatagaaaacacagtcacctcatgtttttttgcaattaaaggggcaaccgcttcgaggtagatttgaatggcgcctcctcgaaccgatgggacaggaagcttctctgtggcgatcagtgctattttcatacatagcctccattcctgcatgatttttaactagttagaatcatgatacggctgaacaaccaacttgtgcggaatgggactgccctaaaaacaaaacgggtaaacaaccagattcatctattaaatatagtcaaataactcaatcattttttccttttgattcataaggtaggagtaaaacaggtaaggatgtgtcctttaatggcagaaaaccatgaagtcattgaggaggggaattcatcagagcttcctttatcagcagaagatgcaaaaaaattaacggagctggctgaaaatgtgcttcaaggatgggatgtgcaggctgaaaaaatagacgtcattcagggaaaccagatggcgcttgtctggaaggtccacacagactccggcgcggtttgtctaaaacgaatacacaggccagaaaagaaagcgttgttttccattttcgcgcaggactatttagcaaaaaaaggcatgaatgttcctggcatactcccaaacaaaaaaggcagcctatattctaagcacggctcatttctatttgtcgtatatgactggatcgaaggaagaccgtttgagctgactgtaaagcaggacttggagtttatcatgaaaggccttgctgattttcatacagcttccgtcggatatcagccgccaaatggcgttcccatatttaccaaattaggtcgctggccgaatcactacacgaaacgatgcaaacagatggaaacgtggaagctgatggcggaggcggaaaaagaagatcctttctcacagctttatcttcaggagatagatggctttattgaagacgggctgcgcatcaaagaccggcttttgcaatcgacctatgttccatggactgaacagctgaaaaaaagccctaacctttgccaccaggattacggaaccgggaatacactcttaggagaaaatgaacagatttgggtcatcgacttagataccgtatcatttgatctgcctattcgcgatttgcgcaaaatgattattccgcttttggatacgacgggtgtttgggatgacgaaacatttcatgtcatgctgaacgcatacgaatccagagccccattaactgaagaacaaaaacaagtcatgtttattgatatgctgtttccttacgagctttacgatgtcattcgcgaaaaatacgtccgcaagtctgctttaccgaaggaagaattagaatcagcttttgaatatgaacgcattaaagcaaacgcattgcggcagcttatttaagaccatcatttcccccgcatatcgggggtttgatctttataagataaagggtaattaaatacatgcggaggttgcaaatatgaaaaagattgtcggcgctttagccgtttttgtgattacatatgcgctgttttcagccgcaggctacctgtttcctgtggaccaagaatggtacaattcattgaaaaaaccggactggacgccaagcggaactgcgatcggcatcatttgggccatcctgtttgccctgatctccctttcagcagccattgtatatgctgcgttttcatttaaaggtgcgaaaagcttttggtttacacttttgataaattacgtgctcaatcaagccttcagctatttccagtttacgcaaaaaaatctgctggctgcatcgcttgactgcctgcttgtcgccatcacagcaatcgtattactgatcattgccaaaaaatacagcagagccgcaagctatcttcttttgccttattttttatggagtgcatttgcgacgttcttatcctttacaatcaattcaatggatctgtgaacaaaaaaagccgcttatacagcggctttttcacatcatcggcttgatgccccaaatgtccttcgcatattcccggatcgtgcggtcgctggagaaatatcctgaatgagcaatgtttacaatcgaacgctcagaccatttccttcgctctcgataatcagcttgaattcgctcctgcgcatctgcatatgagctgaaatccttcagcacaaaatactcatcattatgcggaagcagcgagtcaaagatcgattcaaattcatctgcttctccttcaaaaaaaccattgatcagctgatccgctacctgcctgattcttctgtcatgctgataatattccctcgatctatagccaccattttcctgatacgatagaacctcatccgcctttaagccgaacgtgtaaatacagtcagggcccacccgctcaaagatctcgatatttgcgccgtcatgcgtgccgatcgtcaaagccccgttcatcataaacttcatattccctgtaccagacgcttccttgcttgcagttgaaatttgctcacttacgtctgatgccggaaaaattcgctcagccatagaaactctataattttctaaaaaaacaactttgatcagctgtttgactgccggatcataattgactttttctgcgacagaatggatcagcttaatgattttcttggcataataatagcttggtgaagcctttgccccgaaaataaaggtttgcgggtagattgaaaacccggcgtcctccttgaggcggttatacaaatacataatgtgaagaacattcagcagctgccgtttatatgcatgaagccgtttcacctgtacgtcgaatatgctgtcagggttcacaaccaccccggccgtgcaaaaaatcaaatcggcaagctcttgttttttcttgcttttgttgttttgaaactgttcaataaatgcaggatcagtggcgtacggttctaaacggatcagtgattccggctgtttgacccattcatcgccgatcgcctctgtaatgatggcagacaagcctggattcgcttttaacagccagcgcctgtgggcaattccattcgtcttattgttaaaacgattcggaaacagcaagtgaaagtcgcgcatctccctttccattaatatatcggaatgtatttttgcaacgccatttacactgtaactgcctactatggccagatgagccattttgacaacaccatgcgctgtaatcgccatgtcctctatccttttccagtctcccggatacttttcccaaactgcgcggcaaaacctctcattgatctcttcaataatcatgtacattcgcgggagcagcggcttaaacaaatgaatcggccatttctcgagcgcttctgacaatgttgtatgatttgtataagaaatcgtatgtacagtgatatgccaagcttcttcccagctcatgttctcttcatcgagcaaaatccgcatcagctcaggcaccgcaagcgcagggtgagtgtcattaatatgaatgctcacttttttatgcaggccggataaagatttatgtgtttttcggtaattgttcacaatgctttttaagcttgcgcatactaaaaaatactgctgcttcagccgtaaaattttcccctcatcatgggtgtcatcgggatataagaattcagaaaccgcctctgtttcccgcttataagacaaaatattaccgccgtgataatgcgcatagggctcggcgttccagagccttaacgtgttgacagtgcccgtttcatagccgatgaccgggatatcataaggaacagcggtaacaattgtcgcttgttcgtggcgaaaatgcaggcgcccgcttttttctgtcatatggacttcgccccaaaacggcacgtccactgcttgatccgcattccttacttcccatacgttcccgtttttcagccattgctcaggcagctccacctgatgcccgtctacaattttttgctcaaacaaaccatgcttataacgtatgcccatgccgtgcccaggcaggttcaacgaagcaagcgaatctaaaaagcaagcggccaagcgcccaagtccgccattgccgagacctgcatcgttctctatctgaaggatctcctctaaattgatgccgatttcctttaaaccagcttctacaacatcacgaacaccaagattcattaagttttgctcaaggagctgaccgagcagaaattcgattgataaataatatgtctgcttcccggaatttgatctgcttttttcattcgtttcgatccaatcagcgctgatatactctctgaccatattgcccaacgttttatattgatccagcttggcagaatctttaaagctttttccgcacgtcatttccagacgctttaaaaataagtctgcaaagcgttctttactcgagaacatcccgtccactccttgtcacctgctcgaaaatacgctgatactctttagccgacttcccccagctgtaatctgcattcatagcggtcttcacgatgctcttccatacatcctgttggcaataaaacgacagcgccctttctatcgtaaatttcagatcatgcgcattaaaggcggaaaacgtaaagccattgcccgttccctcttcctcctgataggcacggacagtgtcgtaaagaccgcccgtttccctgacaatcggaatggcgccatattgaagagcaatgagctgccccaaaccgcacggctcaaatttcgacggcatcaaaaacatatcagagcccgcataaatttgatgggctagcggctcatcaaacccgatataagcccggcacttctcatgaaaagcaaattctgcataccggaaataatcttcaaattcacgttctcctgtgcctagcacaaccagctgtatgtcttgctcctcaagaagttcgtgcataattctgcggacaagatcaagccccttttgtttagtgagccttgtcaccatactgatcagcggaatatcgtttttctctggaagccccatccgctgctgaagcttcgttttgttttccagcttgcatgcaagatcccctgaatcgtattgcgcctctatataagggtcgcttttcggctgatagaacgtatcatcaatgccatttaatatgccggttacatcatcttccctatattgcaaaacctgttccaactgctcaccataatacggcgtcatgatttcatttctgtaagtggggctcacagttgtcacatgatcagccgcaatgatgcccgctttcataaaattaacaaatccgttgcattctaacctttcataatgaaaatgatccatctcaagacccagcaagtcatgtgtgacatcaggagggaatatgccttgaaactgcaggttgtggatcgtgagcacgcttttcatccgttcataaaaaggatgttttctgtactcctctttcagcaaataattgaccatcgctgtatgccaatcgtgagtatgaacaatatcggctggaacattcacaactttggcagcctccagcacagctcttgaaaaaaaggcaaaccgctcaccgtcatcataatgcccgtacaacgaatccctgttgaaatagtactcattgtcgatgaagtaataattcacatcgtcttcggccatatgttcaattccgcaatattgctgacgccagccgacagctaccgtacactcagccttttttttcatacgctttttccacggttcaggtatttggctgtacttcggcagcatcacatatacttcattgcctaatcgcgcaagcgccttcggaagagcgcctgctacatcggcaagacctcctgatttcacaaatggggtgcattcagacacagcaaataatatcttcaagaattcatcagctctccttgcaccaaaccttttcttaatacaagcggctgctcagctgttcctacagcttccgtcgccttgccgattttaacgtccttatccgaaatgacctgctcaagaagacaatcctcgccaatctgcgttttttgcataataatacagtttttcagcttcgtaccctttccgacatggaccgccctgaacaaaatgcagttttcaacctctccttcaagcacacagccgtttgccaccaaagaatttttgacagtgctgtgctttccgtatttcgtaggcggctcatccttcacttttgtatagataggctgctgcggcaaaaacacctgctgccaaaaacgaggctgaatgagctccatactgtgggtataatatttttccaccgaatcaatgacagcagcataacctgaatattcataagggcaaatggtcagggcggaagattccttttcaacagcctcctgaatggttttatagcctttttcgctatgtccgtagatcagatcctttaaaagcgttgttgacatgatatagatttgcagcgactggccgtcctgaaatacctcggtgacgtcgcagccaacctcctgatggcgtttcagcacatattgaaattgaatgttgcatacggtatggctgttggagattacagcatattgctgagtgcttctgtggaagtaatctagatggtccgaaaactggcgaaaggaaccgaattcatcgtattcgtgatgaagatggggagacgggaaaaaaaagaggccgtcctttttccggtgcaaatcccattccttacccgccccaaggtgatccatgagcgaacggtaacgatacttcggaaaaattgcaacactcctaatatccgcattcaccatgttggaaagcataaaatcaatcagtcggtacctgccggcaaaagggatcgccccgagcgaccgctttgctgttaaatcctgaagagaatgcttatatgtggtttcatctataacacctaacatttgattattgaacactgactctgccccctcttcagtaattaaatcaattctttttctacaaattcctctgaaacgagcagcacctcttcaatgtctttttcggagcgaatcactgcgccatccggcagcaccatcccattaggaacaatggcattttcaatgactacatgctccccaatcgtcacatccggcattatgacggatgatgtaacagtcgtatgcttaccaacagtcacaccttgaaaaagaacggagtgagacacatttccatatacaacacaaccttcgttcacaagcgaatcttgaacctgcgcatcagatgaaataaattgcggaggctgatttggattgacggagtaaattttccatttgcgttcaaacagcttcagctccgagtcctcttttaacaaatccatattggcttcccacaagctctgcaccgttccgacatccttccaatatcccttgaacggataagcagaaagcttctttttctcttccaaaagcagaggaataatgtctttgccgaagtcgtggctagaataagggttttgatcgtccatctcaagatactgtttcaaaagcggccaattgaatatataaattcccattgaggcaagattgctcttagggaatttgggcttttcatcaaaatgtgtgatcgtcccatctggattggccttcatgatgccgaaccggcttgcttcctccaagcccacttcgatgacagagatggtcacatctgctttcttttcaatgtgataatcaagcattttgccgtagtccattttgtatatgtgatctcctgataaaatcagtacatactcaggatcatactgattcaaataattgagattttcataaatggcgcttgccgtccctttataccacttgacttctgatgactcggcataagggggtaaaaccgtcacgccaccattatatctatccaggtcccatgcactgccgatcccaatataggaattcagctcaagcggctgatattgcgttaaaatcccgactgtgtctatgcctgaatttgaacagttgcttagggtaaaatcaataatcctgtatttacccccgaaagatacagccggtttagccatattttttgttaatccgctgagacggctgcccttcccgccggcaaggagcatggctacacattgttttttcatctttttatctctcctctttttttaaccgcccgtaaaatcgagatgccgtaaggggggatggtcatcgtgatataacacggtttatgatgaagtgctccctttttagccgataatggctttttgttgatttgccctgagcctccatatgtttcactgtcactgttaagcacttcaatgtattgagtaaaaaaaggaactccaacatcatattgatgatagaccacgggtgtaaaattacaaatgatgacaagcgcctcaccgtgctttttgccataacgaataaaagaaaagattgattgttcgtcattatggacatcaatccattcaaacgattgtgcacgatggtcatgctcataaaggattttgcttttttggtaaaagcggagaagatcttgcgtaaaaacgctggctttctgatgcatggggaaggagtccaaaaaccaatcaagctgttctgtatctttccattcatcaaattgggcaaactctgatcccataaagatcaatttctttccgggatgcactgtcatatagcccagcaaaagccgatactgggcaaatttctgccagtagtcgccaggcattttattaagaagtgatttttttccgtatacgacttcatcatgagaaaacggcaatacaaaatgttcactaaacgcatatagtaatgaaaaagagataagctgatgacaatgccgcctttcttcgggcggcgtctccatgtatttcagtacgtcattcatccatcccatattccatttataatgaaaaccaagccccccttcctcaacggcacctgtcacttgaggccattctgtagaatcttccgcaatcatcatcacatggggatatgcctctctcatggtttgattgagtttttttaaaaactcaacagcatatggattcgtgtggcgttcatcctgatttggccaatacaagatattagccactgcatcaaccctaaatccatctatatgatagaattccgcccagtacaacgcattcgaaattaaaaaactatgaacttccggttttcccaggtcaaagtttgccgtgccccataaccagttctcccgatcacgttcttctttgtattcataaagcggttctccatcaaacatatagagtccatgtgcatctttacaaaaatgtccggggacccaatccaaaatgactccgatattttgttgatgacattcatcaacaaacttcatcagatcatgcggcgggccaaacctgcttgtcgggctgtaataccccgttccttggtacccccatgaacgatcatatggatgctcatacaccggaagcagttcaacatgggtaaacccatgctccttgatataagggataagcgtctgacttaattctttataggaataatgcctgccatcagaatgcttcttccaagacccaagatgcagttcataaatgaaaacaggtttttcatacagcgtcttagtcttctgtttcttttgccatttttgatcttgccagctgtacccttccaaatcgtaagtaagtgacgctgtgtttggtctgacttctgaataaatagcgtatggatctgccttcagcctgatctcaccgttattcgtcacgatttcatatttatatcgttccttttctcctaaacctggaataaataacgtccaaataccactatcattcactctgtgcatcacatgctcttctccagaccagctgttaaaatctccagccactcgtacttccgacgcatgaggcgcccacacacagaattcatatccgcttttgccattcagctcgcggtaatgcgagccaaacagctgatagctttcaaacagactgccttcgtgaaaaagataaacatcatgtgctgtcgggctggcagcggccatgtaatcatcctttctgacatcatagttttcatttatagtatttattcgaagaaataaaaaaaagccctttgctgaaagcgcttatacttatagacaattaacttcattttctgaagaaaaacgaaatatatggagatttttgtagtctgcttttaaaataaagaacaaaatctaagacatatcatgatttagaaaacaaaaaaaccttgcaggatatgcaaggcttctggatgacccgtacgggattcgaacccgtgttaccgccgtgaaagggcggtgtcttaaccgcttgaccaacgggccgataattattatacctgtaatcatatggcggagaaggagggatttgaaccctcgcgccgcttacacgacctacacccttagcaggggcgcctcttcagccacttgagtacttctccatttggctccacaggcaggattcgaacctgcgaccgatcggttaacagccgatagctctaccactgagctactgtggaatacaaaagtcatggtgggcctgaatggactcgaaccatcgacctcacgcttatcaggcgtgcgctctaaccagctgagctacaggcccatgacgatatagaaatggagcgggtgatgggaatcgaacccacgacatcagcttggaaggctgaggttttaccactaaactacacccgcaatttttatttggggcgattgatgggaatcgaacccacgaatgccagagccacaatctggtgcgttaaccacttcgccacaaccgccaaaatatattgataaatggtggctcgggacggaatcgaaccgccgacacacggattttcagtccgttgctctaccaactgagctaccgagcctaagtatttaaatggcggtccggacgggactcgaacccgcgacctcctgcgtgacaggcaggcattctaaccaactgaactaccggaccattttaaaatttggttgcgggggcaggatttgaacctgcgaccttcgggttatgagcccgacgagctaccgaactgctccaccccgcgatgattaggaatatgtatggcggaggaagagggattcgaacccccgcgggctttgacacccctgtcggttttcaagaccgatcccttcagccagacttgggtattcctccgtatagtggtggaccttgtaggactcgaacctacgaccggacggttatgagccgtctgctctaaccaactgagctaaaggtccattggtagcggcggaggggatcgaacccccgacctcacgggtatgaaccgtacgctctagccagctgagctacaccgccaaatatttttagaaatcaagtggagcctagcgggatcgaaccgctgacctcctgcgtgcaaagcaggcgctctcccagctgagctaaggccccaagaatggtcgggaagacaggattcgaacctgcgaccccatggtcccaaaccatgtgctctaccaagctgagctacttcccgatttcatatagatcatggcgcgcccgagaggagtcgaacccctaaccttttgatccgtagtcaaacgctctatccaattgagctacgggcgcaaaacttaatgccgagggccggacttgaaccggcacggtagtcacctaccgcaggattttaagtcctgtgtgtctgccaattccaccaccccggcgtggatggtatagttggagcggaagacgggattcgaacccgcgacccccaccttggcaaggtggtgttctaccactgaactacttccgcagaaatggtgcggatgaagggacttgaacccccacgtctgtaaagacactagagcctgattctagcgcgtctgccaattccgccacatccgcaacatgtaaatggtgagccatgaaggactcgaaccttcgaccctctgattaaaagtcagatgctctaccaactgagctaatggctcttcttacaagagacttgaatattatatcatataaaagtggtgccggcaagaggacttgaacccccaacctactgattacaagtcagttgctctaccaattgagctacaccggcatatatgtaaaaccgatatgtataatgaaaaatggtggaggatgacgggctcgaaccgccgaccctctgcttgtaaggcagatgctctcccagctgagctaatcctccatacttgcactaacgtgcaattgcttggcggcgtcctactctcacagggggacccccccgactaccatcggcgctgaagagcttaacttccgtgttcggtatgggaacgggtgtgacctcttcgctatcgccaccaaacaaattgagagtgttctctcaaaactagataacaggtgtgacatcattcaaaaatatggttaagtcctcgatcgattagtatctgtcagctccatgtgtcgccacacttccacctcagacctatcaacctgatcatctttcagggatcttacttccttgcggaatgggaaatctcatcttgagggggcttcatgcttagatgctttcagcacttatcccgtccgcacatagctacccagcgatgcccttggcagaacaactggtacaccagcggtgcgtccatcccggtcctctcgtactaaggacagctcctctcaaatttcctgcgcccgcgacggatagggaccgaactgtctcacgacgttctgaacccagctcgcgtaccgctttaatgggcgaacagcccaacccttgggaccgactacagccccaggatgcgatgagccgacatcgaggtgccaaacctccccgtcgatgtggactcttgggggagataagcctgttatccccggggtagcttttatccgttgagcgatggcccttccatgcggaaccaccggatcactaagcccgactttcgtccctgctcgacttgtaggtctcgcagtcaagctcccttgtgcctttacactctgcgaatgatttccaaccattctgagggaacctttgggcgcctccgttaccttttaggaggcgaccgccccagtcaaactgcccacctgacactgtctccccgcccgataagggcggcgggttagaaggtcaatacagccagggtagtatcccaccgatgcctccaccgaagctggcgctccggtttccaaggctcctacctatcctgtacaagctgtaccaacattcaatatcaggctgcagtaaagctccacggggtctttccgtcctgtcgcgggtaacctgcatcttcacaggtactataatttcaccgagtctctcgttgagacagtgcccagatcgttgcgcctttcgtgcgggtcggaacttacccgacaaggaatttcgctaccttaggaccgttatagttacggccgccgtttactggggcttcaattcgcaccttcgcttacgctaagcgctcctcttaaccttccagcaccgggcaggcgtcagcccctatacttcgccttacggcttcgcagagacctgtgtttttgctaaacagtcgcctgggcctattcactgcggctctctcgggcttgcaccctaacagagcaccccttctcccgaagttacggggtcattttgccgagttccttaacgagagttctctcgatcaccttaggattctctcctcgcctacctgtgtcggtttgcggtacgggcacctctcacctcgctagaggcttttcttggcagtgtggaatcaggaacttcgctactatatttcgctcgccatcacagctcagccttatgggaaacggatttgcctatttcccagcctaactgcttggacgcggatatccaataccgcgcttaccctatcctcctgcgtccccccattgctcaaatggtgaggaggtggtacaggaatatcaacctgttgtccatcgcctacgcctttcggcctcggcttaggtcccgactaaccctgagcggacgagccttcctcaggaaaccttaggcattcggtggaggggattctcacccctctttcgctactcataccggcattctcacttctaagcgctccaccagtccttccggtctggcttcacagcccttagaacgctctcctaccactgttcgaagaacagtccgcagcttcggtgatacgtttagccccggtacattttcggcgcagagtcactcgaccagtgagctattacgcactctttaaatggtggctgcttctaagccaacatcctggttgtctaagcaactccacatccttttccacttaacgtatactttgggaccttagctggcggtctgggctgtttccctttcgactacggatcttatcactcgcagtctgactcccaaggataagtcattggcattcggagtttgactgaattcggtaacccggtaggggcccctagtccaatcagtgctctacctccaagactcttaccttgaggctagccctaaagctatttcggagagaaccagctatctccaggttcgattggcatttcacccctacccacacctcatccccgcacttttcaacgtgcgtgggttcgggcctccattcagtgttacctgaacttcaccctggacatgggtagatcacctggtttcgggtctacgaccacgtactcatgcgccctattcagactcgctttcgctgcggctccgcatcttctgcttaaccttgcacgggatcgtaactcgccggttcattctacaaaaggcacgccatcacccgttaacgggctctgactacttgtaggcacacggtttcaggatctctttcactccccttccggggtgcttttcacctttccctcacggtactggttcactatcggtcactagggagtatttagccttgggagatggtcctcccggattccgacggaatttcacgtgttccgccgtactcaggatccactcaggagagaacgaagttttgactacagggctgttacctcctatggcgggcctttccagacctcttcatctacctcgttcctttgtaactccgtacagagtgtcctacaaccccaagaggcaagcctcttggtttgggctaatcccgtttcgctcgccgctactcagggaatcgcatttgctttctcttcctccgggtacttagatgtttcagttccccgggtctgccttctcatatcctatgaattcagatatggataccactccattacgagtggtgggtttccccattcggaaatctccggatcaaagcttgcttacagctccccgaagcatatcggtgttcgtcccgtccttcatcggctcctagtgccaaggcatccaccgtgcgccctttctaacttaaccgttaaaaagaatcactatgtgatatcttgtattactaattgaatgtgatgtctactgttatctagttttcaaagaacacgtttcgaaggaatgatccttcaaaactaaacaagacagggaacgttctgtttataagacccaaggtcttatattccgtataatatccttagaaaggaggtgatccagccgcaccttccgatacggctaccttgttacgacttcaccccaatcatctgtcccaccttcggcggctggctcctaaaaggttacctcaccgacttcgggtgttacaaactctcgtggtgtgacgggcggtgtgtacaaggcccgggaacgtattcaccgcggcatgctgatccgcgattactagcgattccagcttcacgcagtcgagttgcagactgcgatccgaactgagaacagatttgtgggattggcttaacctcgcggtttcgctgccctttgttctgtccattgtagcacgtgtgtagcccaggtcataaggggcatgatgatttgacgtcatccccaccttcctccggtttgtcaccggcagtcaccttagagtgcccaactgaatgctggcaactaagatcaagggttgcgctcgttgcgggacttaacccaacatctcacgacacgagctgacgacaaccatgcaccacctgtcactctgcccccgaaggggacgtcctatctctaggattgtcagaggatgtcaagacctggtaaggttcttcgcgttgcttcgaattaaaccacatgctccaccgcttgtgcgggcccccgtcaattcctttgagtttcagtcttgcgaccgtactccccaggcggagtgcttaatgcgttagctgcagcactaagggcggaaaccccctaacacttagcactcatcgtttacggcgtggactaccagggtatctaatcctgttcgctccccacgctttcgctcctcagcgtcagttacagaccagagagtcgccttcgccactggtgttcctccacatctctacgcatttcaccgctacacgtggaattccactctcctcttctgcactcaagttccccagtttccaatgaccctccccggttgagccgggggctttcacatcagacttaagaaaccgcctgcgagccctttacgcccaataattccggacaacgcttgccacctacgtattaccgcggctgctggcacgtagttagccgtggctttctggttaggtaccgtcaaggtaccgccctattcgaacggtacttgttcttccctaacaacagagctttacgatccgaaaaccttcatcactcacgcggcgttgctccgtcagactttcgtccattgcggaagattccctactgctgcctcccgtaggagtctgggccgtgtctcagtcccagtgtggccgatcaccctctcaggtcggctacgcatcgttgccttggtgagccgttacctcaccaactagctaatgcgccgcgggtccatctgtaagtggtagccgaagccaccttttatgtttgaaccatgcggttcaaacaaccatccggtattagccccggtttcccggagttatcccagtcttacaggcaggttacccacgtgttactcacccgtccgccgctaacatcagggagcaagctcccatctgtccgctcgacttgcatgtattaggcacgccgccagcgttcgtcctgagccaggatcaaactctccgataaatggatcacaggttaagttcaccgcatcctgcggcgacacctgtgtgacctgcgtcgtgcagaccctagtttgactgactacgcacatcgctgtgcgatttttaaaaactgaattaacaggtacgttttgtcttgtttagttttcaaagatcatttcgttacttctcaatgaagcagctttactaatataacattcagcttcttttttgtcaacaacttttttcaagttgttttgaagcatctagtttgtgtccgctgtgcatcagcgacgtttaataatataacacctgtatttatttattgcaatagtttttttaaaaaaatctataaaacaaataaactataatcctcgccatgatttctaaagcgtgtgtatcatataagtttcttaaaagaacatatacatcagtcatgtgatcttgttgtttttttcgttttcttgtatagtagaaacgaactaaatactgatgaccacaaggggagcattaaagctgagagtgagcggtttcgttctgaccctttgaacctgttagttaacgctggcgtagggatgtggcaaagtcaaatgaattgcagatcgtaaagcagtgcgtggaacttttctcatccttccgcgtgctgcttttttgttgtccttttggttgtctgtcaatggaaggagatagatatgaatcaatctaagcaactggttcgccttattgaaattgccattatgacagcggcagccgttattttagacattgtctcaggaatgtttcttagcatgcctcaaggaggctcggtctccatcatgatgattccgatctttttaatttcgtttcgctggggtgtcaaagcaggtcttactacaggtttgttgacaggtctagtacaaatagcaatcggaaacttgtttgctcaacatcctgtacagctattgttagattacattgtcgctttcgcagcaatcggcataagcggctgtttcgcttcttctgtccgtaaagccgctgtatcaaaaacaaaagggaaattgattgtttcagtggtcagcgcagtttttatcggcagtttgctgcgctatgccgcgcatgtcatttcaggagctgtgtttttcggcagctttgctccaaaaggaacaccggtatggatttattctttaacttataatgcgacttacatggttccttcattcattatttgtgcaattgtcctatgtttattatttatgacagcaccccgtttgcttaaaagtgacaaagcgtaaaagtaacaatcccccagcgaattccgctgagggattgttcgttatctgttaagaagtgtttttaaagctgaaagatccggccagccaagacctacttctttcagccttactccggcaatttcaaagttgtcctccgctactctttcaggtgaataggcctgataaaatataattgagggattctgctcaataacccaaacaaacatacttgaaaatccatgttgaagcaaaaactccgctccttttgctaagagcgccctgcctgcaccttgccgctggcgctcttccagaagataaatagcgtataactcgccgtcatagccttcttgttcagagcgaataggtccaaatgaagcaaagccgaatactgaatccatttcgtcctgagcaacaaatactccttttaacgagcgacttttccatttgtcttcaaattccttatagttcaggctgtttaaataatcaatcgggataatttcgtggtatgttgtcctccagctgtctacatgcacttttgcaataccctttatatcctctaacttcgcttcacgtacagttaccatacggttctgtcctttccttactctgatttttggaccgttttggcttctttgatttcatttgttaattcattgatgctttgttttacgtttccttttcctgaaaagttctcaagcatttcttttacatcgattcccgaggatgcttttaaactttcttgcagacttgacattaagttcgtcgcatagctggttactttgtttgctccgcttgattcaccgcttcctcctgtatcgacaacggtgattttatcaatatttgaaagaggtgccgctgcttgtttcgcgtattccggaagcattttgacaatcatatcgaaaatcgccgcctgcccgtactgttcaaaggcggccgcaattttctcttttgcttccgcttctgcaagacctttcaggcggataacctctgcttctgtctctcctttcgctttttccgcttctgcttttgctagcccgtcaattcttactttttccgcctcagcctttgccattgcttcaatactgtacttcttggcatcggcttccgcgagctgtttggctttctcagctgctgcggactgctcaacagaataacggtctgcatcggcttttttctttacctctgagtcgtattgacgttcacggcgaagaatttctttttcttctagttctatttgtttttggcgttcgataattttaacctgcatttcctgctctgtgacttgctggcgcgctcgggcagtctctaaatcatatgcttggtcggcattcgcttttgccgtatcttgttctctgcggaattcagccattttgagctgattgattttttcagcttcagcgatttccgtcgcccgttcaagttctgatttttttgcgtctttatcggcttctgcccgcttaattcgggtttctttatcagcctctgctgttgcgatatcagcatcgcgttttacttgggcaattctcggtttccctaatgattcaagataaccgtttttatcacgaacatctttaatggtaaacgagacgattacaagtcccattttcgcgagatcctgtgaagcgacacgctgcacctcttgagagaatttttctctgtttttatagatttcttctactgtcattgagccgagaatggaacgaaggtggccttctaaaacctcccgcgcttcctgctcacggtcgtcttttgatttccctaaaaattgttcggccgctgtagcgatttctcctatagaaccgccgattttaataatcgcagttccatcggccattactggcactccttgttctgtatagacttcaggtgtcgaaacatcgagtttgcttgataataggcttagcggctctgcctgctggaagacgggaaggacaaaggttcctccgccgcggacgattttaatacggttgccgccttcatcgacatgaacatttttattacccagatagctccctgttacaattaacgcttcatcaggccctgctgtacgatacttcgtaataaacacagctattagtgcaattaataaaaagaatacaactccgatgatcattataatcggcattgtcatatcaaattcctccttttatgttaaatgggttcatgcggagtaaccgaaagaactccgtttttgacatctacgactagcactcttgtgccataaccgatctgttgattttcaaagctgatcgctgacttcgagatggtgccgcctatcccttcaatgaccacttcaccaaacccgtcaacaggaacagctgtaatcactttaccgagtcttcctctgagatcatcttctctatatgccaatgattcttctgcagatgataatggtaccagtacaaagatgtgaagcaataccaccagcatgatcgaaaggatgcaagataaaagcgcaatcagcaagcttgacagaggcaatacgagttcacctatatatccgtccgctgaaaaacatgtgaaaaatgagagcactaatgtcggattaagaaacggaatgccttctggcagccctgcaaatacatctccgaaaaacagaaataacagcgtaaggctgcccgcaataataagcgtataaagataaattgtttgtataggtactccaaataactccaatttcctcatcctttcttcatcaatgcattgatgaacggctgccgttaccattaatacgagacaccccgggaaaagtttcaaaattttaagataagtaacccatttgaagtgctttataaatgataattgcttatatatatggtaatgtcattttaggaggagatatgatgagtatctttaatgaagccagattagaaacgtggaacgaattgaaaggactttctgacgaaaagctgaatcaaaagccttctgctgaagaatggagcatacgggaagttcttgaccatttgaaaaaaatcgatatgaccgcacaaaaaatgttgaaggaacgtgtacaggacgctccgattaaagaaattgaagaaaaaccgcttgaggtagcacaggacagaaataataaacggaaagccccgagtcatcttgagcctgcgcatgattttatttcaggcagccaaatgaaacgtgagcttgatgtggtaagagagcagctgactgctgcgattgcctctctgaaagaagaagattttgaaagagtgcttccgcatcctgtgtttcaagagctgactgtcagacagtggatcgattttatcggccatcatgaaaaacggcacctcagccaaatgaaagaaattaaagaaaagatagaaagggcctgatttaatcagaccctttctgcttttcgtttgacttttcgctgataggaatgaacttctatttcatcacctgtgtaaacagcaccaggtctctccacaatacagacaacccctctaatgcccagtgcgtggcggacgaaagccggcgccagcttcggttggtccggataataagactgaatgacttctcccggctggatacacggatcattttcgccctcacacagcagagccgctccgctcggaaaaataatccggcttccttcttttaatgaagtaagatctggcataccgctgactgccacattcgccccgagccattccggcaaaattctcggcactcccatttttaaagcgatttcgttgcattcctctattgaaacaattgaaatttgtctgcggttgaaaatttcagtccctcttgaaaacattggttctctggctcccgcttttttggtcaggccaaaatgcaagtcgccggggatgccgccataatcaaaatcaagcttgtccatttgctttgttacgaagctttctgtatctgcgatatataagccttccgcttttgcagtcatacgcttccacatcagctggcaccttccttcttatctaaaatttccgcctatgcttcattatcccaaaaaatcccgctctgtaaaggagcgggattttgattataccgttttaggcgtaaggttaaagcagcgcttgtagatccagttgtatgctttttcatttaaatctctagggtttccgaaggtttgcggatctttcattgcttctttagacaagcgttcgatcatatcaggtgatactccctgctcttctaaagtcagcacttctaaatcttcgaccagatcatacatccaattgacagatgctttcgcagcttcttctgttgtcatcttgcttgtatcaataccgaacgctttcgcaatacgcgcaaacttctcaggatagcccttccagttgtattccatgacagggcccatcatcgccgctacacattggccgtgagcgactgggataataccgccaagcgtttggctcatcgcatgagccgcgcccgctgattcacttccgtaagaaaggccggcaagcatcgctgcctgcgccattccgtaccttgcttccagatcctctccgtcagcaaatgccctcttaatgtaatgagcggcatactcaatcgccattagggcaaccgcatccgtgattggctgtgcaaatttcattgtatagcactcaatggcatgggcgagcgcatcaattcccgtcatagctgttacatgcggaggcattgaaacatgaagctcaggatcaatgatggtcaagtgcgctgcaatcagcggaccgcccgtgttgaatttgaattctctttcttcatctgtgataaccgcccattgggttacttctgatcctgttccagctgtagtgggaattgtcgtcagcggaggaatgcggttttccagcggttttttcccatctgccgcttcataatcaagcacgcttccttcgtgagtcgcttctactccgattgcttttgctgtatccatggagcttccgcctccgactgccaccaaaccattacagttctcttttttgtaaagctcagatccttcattcaccagacggacaggcgggtttggctcaactttattaaagagcaccacttcaatgcctgcttctttaagtgattcgattacaggatcagcaacaccggctttataaatccctgggtctgtgacaaggagcgcttttgaaacgcccagtgcagctacttcctcacccgtatgcttgatggctccgattccatgcttaatcacagtcggaatttcaaatgtgtggaatttctgcatgctttctaccttcatatttaatgtcatcatcaatctccccctcttatgaattgaaccagttaaccgctgccggttttgtattacggtatacatgtttgacttctgtgtattcttcaaggcctatttttccaagctcgcgtccgaacccggattgcttatatccgccccatggcgcttgtgcaaagtacggatgaaaatcgttgatccaaacggttcccattctcaagcgggctgctacccgttcgcacttttcaatgtcttttgaccataccgctccagccaagccatagatggtatcattcgcaagctcgattacctcttcttcagagctgaaggtttcgactgtcaatacaggaccgaaaacctcttcctgaacgattctcatgtcagaattacagtttgagaaaatagtaggttcatagaaaaagccgttttgaagctcaggatcttccgggcgtttgcctcctgtctccagcttcgcgccttcctctattccgatctcaacatatttttctacctttgccctgtgctccgccgaaataagcggaccgctttctgtctcagcatgaaaaccgtttccgagttttatgcgttttgcccgtttgaccagctccgccaaaaattgatcatgaatggcatcctcaacaagcaagcgggaacctgcagagcatacttggccggcgtggaaaaatacagcgtttaaggcctgatcaaccgcaacttctaaatccgcgtccttgaaaacaatatttgggtttttcccgccaagttcaagggcgatttttttgacgtttccgcttgccgcccgcatgatttttttgcctgtttcaattccgcccgtaaacgaaatcaaatcgacgtctttgtttacggcaagctcgtcgcccactgtggctcccggtccaaggacaagatttgcgacaccttttggtacaccggcttcttccatcagcttaaagactttgattgtcgtcagcggcgtaatctcactcggcttcatgacgattgtgtttcctgcagccagtgcaggggcgattttccagctcgcttgaaggagcggataattccatggagtgatctggccgcaaaccccgattggctctctaataattttgctttctgaatcaggaatcggagatgaaatgatctctcctccatctttgtctgccaagccggcgtaatattgaaaaacattggcgatatcgtccatatcggccttgctttcttcgagtgtttttcctgtatcaagagattcaagctcagccagctcctcaagatcgcgtctgattaattccgcaattttcagaacaatttttccgcgttcaagcccggatagcgatgaccattctcctttgtcaaatgctctgcgtgcggctgcgattgctttgatggcgtcctctcgccctccctcgcttacagttgcaatttcttcttgattaaatggattgataatactgcggatctgttctttttcggcactgatccattctccgtcaatgaataatgtttgactcatataagcctccttgacgtaaataaagtttgttaaataaaaatttaatgtttttaacaaccttaatctaacatatggtttttaaactgtcaaagtcccattttgatttttctttttgacttttcctcatgtttcgttaagataaagaacataaagaaataacttaacgaatttaattttctaaaggaaaagagggtcagtatggatgaaaatccagaatttgcagctatagaacaggctcgggatcttgttattgactccattgctgaaacgatggatctttacggaattacccgcagtgtcgggattttatatgggacgatgtatatgagggatgagatgacgcttgacgaaatgcgtgaggagttgcaaatgagcaaaccaagcatgagcacaggcgtcaaaaagcttcaagacttaaatgtagtgaaaaaaacatttcaccggggcatccgtaagcatacatttgtggctgagaaggatttctttaaatttttcacaaatttctttccacctaaatgggagcgggaggttcaagtgaatgtagcagcgatcgaggaagctcaagctgatttacaaaaggttttatgcaaggaagatctcgatgaggatatcaaaaatgaagcactgcagttatatgatcagctggaaagctctaaagcttactatgactggctgaaacggcttgctgaatcggtgcagaccggagaaatttttaaatttataccgatcgaaacaaagtaaagcagaaaacgcctgggaaagcaggcgtttttttgatgtaactactacaaatttgaaaaatacgggaaaaacaccccatttacttccaaaatatttgatggtaattttatgtaggtaaaatttgtatttggcctttcagaggaggtgaaaagcgggcaggcctgtttaatttatcattttttagggggaattttgttatgaaacgcaaattattatcttctttggcaattagtgcattaagtctcgggttactcgtttctgcacctacagcttctttcgcggctgaatctacatcaactaaagctcatactgaatctactatgagaacacagtctacagcttcattgttcgcaacaatcactggcgccagcaaaacggaatggtctttctcagatatcgaattgacttaccgtccaaacacgcttctcagccttggcgttatggagtttacattgccaagcggatttactgcaaacacgaaagacacattgaacggaaatgccttgcgtacaacacagatcctcaataacgggaaaacagtaagagttcctttggcacttgatttgttaggagctggcgaatttaaattaaaactgaataacaaaacacttcctgccgcaggtacatatactttccgtgcagagaataaatcattaagcatcggaaataaattttacgcagaagccagcattgacgtggctaagcgcagcactcctccgactcagccttgcggttgcaactaatgtaaaagaccggttaacgccggtcttttttgcgttttaccctcccctttttctctaattcccgttatcttttttctggtttaaaatttaaattgacaaacactagaaacaggagtaaattcttgagtgttcaatttcatacagtctcttttaccgcttaatcaaacacgaacgggggaaccaacgattggctgttttattaacagccttggggtgaatcttactaagtaagagggggtactctgaatccctaatccgacagctaacctcgtaggcgtatacagagaggaggtctattatttggccattctttgcaatggtcttttttgcttcagaaacgttaattcactaagggagatatgaacattgggaagaattaaaaataagcaatttgccgtgatcggtctgggccggtttggcggcagcatttgtaaagaacttcatagaatggggcatgaggtccttgcggttgatatcaacgaagaaaaggtcaatgcatatgcttcttacgccactcatgcggtaattgccaacgccaccgaagaaaacgaattgctttcattaggaatacgcaattttgaatatgtgattgttgccatcggagcaaatattcaagcgagtacgctgaccaccctattattaaaggagcttgatattccaaatatttgggtgaaggctcaaaactattatcatcacaaggtgcttgaaaaaatcggcgctgaccggattattcatcctgaaaaagatatgggagttaaaatcgcacaaagcctttcagacgaaaatgttttgaattacattgatctatctgatgaatacagtattgtcgagctgctggctacgcgcaagcttgattcaaaatcgattattgacctgaatgtaagagcaaagtacggctgcacgatcctggccatcaaacatcatggagatatctgtctttcccccgcgcctgaagacatcattcacgagcaagattgcctggtgatcatgggccacaaaaaggatattaaacgttttgaaaacgaagggatgtagacaaaggtgacacttcaaaaggataaagtgatcaaatgggttcggtttacaccgcctcaagtgcttgccattggttttttccttaccattatcatcggggctgtcctattaatgcttccgatttccactacgaagccattgtcatggatagatgctctttttactgcggcttccgctacaactgttacagggcttgctgttgtcgataccggtactcaatttacggtattcgggcaaacagttattatggggctgattcagattggcgggcttggatttatgacgtttgcggtcttgatcgtcatgatattaggaaaaaaaatcggattaaaagaacgaatgctcgtccaggaagccttaaaccagccgacaatcggcggtgtcattggccttgtcaaagtcctgtttctgttttcgatcagtattgaattgatagcagcactcattttatccatccggcttgtacctcagtacggctggtcatccggcttgtttgcaagtttgtttcacgcaatatctgcttttaacaatgccgggttttcgttgtggcctgataatttgatgagctacgttggcgatcctacagtaaacctcgtgattactttcttatttattacaggagggatcggatttacggttctgtttgatgtgatgaaaaatcggcgttttaaagctttttctttacatacaaagctcatgcttacaggaacgctgatgttgaatgcgattgctatgcttacggtctttattttagaatacagcaaccccggcacgctcggccacctgcatatagtcgataaactgtgggcgtcctattttcaggcagtgacgccgagaaccgcaggcttcaattctctagattttggaagcatgagagaaggaacaattgtatttactttattattgatgtttatcggagcaggaagcgcatcaacggcgagcggcattaagctgactacgttcatcgtgattttaacatctgttattgcttacttgagaggtaaaaaagaaacggttattttccgccgttccatcaaatatccgattatcattaaagctttagctgtgagcgtcaccagtttgttcatcgtgtttttagggattttcgccctgacgatcacagaacaagcgccatttcttcaaattgtgtttgaaaccttttccgcattcggaactgtcggccttacgatggggcttactcctgaactgacaacagctggcaagtgtatcattattgtcatcatgtttatcggaagaattggtcctttaacgttcgtgttttcattcgcaaaaacagagcaatcaaatatccgttaccctgatggcgaagtgtttacagggtgatatcaaaaaaatccggcgtgcagtcgccggatttttttatgattcgatatgagattgattttgtcttttttcctgttccgcgatgatttcattatcctccgcgttatcacgggttactttttgtgtaagaatcgcaccaactgctacaagtatcataacagcgatgtaataacctttttcattgagttccaggttatcagcattatagagtccgatactaaacaaaaatactcccgcaaaaaaagtaaaataagctaatactgtaaaggcaaccgtgtttctgcgtctatatttctgcacctttgttccctcccgaaagcatagttaaaaagtgataacttccgtggaatattatacctcaaattccccgtaatggaacaaagaattaaaaataccagtaaaaagggcttaggttgcctcctttatttcaacagctgaatcatcaatccagccgataagtttatcattgatttggaattggtaccatacagactggcctttctgttttttagacacaacctttatgtctttgccgacgtaagattgggcagaggtaagccttatggaccgatcatcagtagagggcttggaccatacgtcttgaacggcactgtctttaatagaggcgtttaaatccacagatttgagggatggatttacctcatcgtactcatctaaatcgtatttttccacaatagcgctgattttgtcagcgtagtcagggtctgtagcatatcctgatgtttgcagggcggttgccgcttccttataattccctgcctcaagcaccggtttatacttctttttattccacgatgtgccacgaacgaacaattgggcgtgatcatccatagattcaaaaaacgtgctgtattttcgaaacttcgcgcgaatggtttttcttttccctttttcaacttcgtccgtttccatcgtgacatgatggcctttataattcccttttacgccaaaaaggttgttggccttagcagccagttcactgttcccccagtccgattcgagaatggcctgagcaattgtgatgctggggagaacatggtatttttcatacaaaatttgggcatgtccggacagactgtctataaatacttgctgttcatcgatttcttcagtttctttggatatttcaatcggttttgataaagttgtcgctaaaacaaacagagctagcggaatcgatacaaggaaaaatagtgaaatcaagagtttacgttttttaagttttttacgggccatgaaaaccttccttcgaattaaaagattacgaatgtaaaagaatctaccttttagaattttacttgcacttctaatatttttcaattctttagggataaagttgggaaaagattgcaaaataaaaaccttttcgctcaatgaaaaggtttttaccatgtttctatttttgtaaatttctgagtgcattacgatattccgtatcatttattactttatatgatttgacagttgccttcgacaaaccttctgctgaaacggccggtttttccggagctgttttcgctttatcatgtggtttatgtgccagcttgtgccccattccagtggcattcatacaaaatgacaggcagacgagcagcacgctaaggataaaagaaatgaagaagagatcatgataagcagtcatcatagaatcctgttccgaaccgctttgtctggcagcatcttttttcgtgaaaaagccgatgagaatgggaactcccatatagacaaacaatcttaaaaactgaacagctgtcattctcttgaccaaatcaggcagcgggcctcccatggcagctcccatcagccctgcggcgactgtcaggcctgttcccgctgcaagcatgataaacagtgccgcgaacatataaagagatgatcgatcctgtatatgcagccattgaaaattcacaaaaacgagaatgagtccgccgataataccgagcatccctggtccgactttatcatataacagagcgcttaaaatggccgcgatcgccactccgattaaaagagtcaagtttaaaaaaatgagatgctcctgagaaatatcatacatttgacggagcaagccttgaaaagcagacaggctgacagctaccgttatcgtccctgcagctatgatcaataagccaagcaccggttttggcagcagcatcagtttaatagatatgaaggggtttttcactttatattccacaatcaatagaccaatgagcaaacataacgtcaccccgaaaccaatccatacataacccgatgacagcccccatttttgcagaaaaatgaatgaaaccgctgaggctgcggcaaggaagacagataaaagaattcccgcacgatcaagcggctgttcttgatccgccgctccgtgatgctcatcatgaagaaagaaatagctcaccgcgacaccgatcagggacaaggtgccaaagatgataaacagccatctccaatgcccgcagcttgttgcaatggttcccaggattgtaccgatgataacagaaccatagaatcccccgatcagcacaagcagtgcatagttcctgcgttcaatcgggaatgacagtacaagcattggaatcataatcatcagcatgacgcctgttgccgccccctgtaaaaagcgccctgccgccatccatgcaatatcgcctgaacatgcgatgagcagtgagcctagtataaagacaggtaatgaagccagatagacgggacgcgcaccgaattttttcctcagcagcggtcctgccggaactaacaaggcaaaggccatattgccgatcaatatcgggtttactaatgtgaagacacttgttccaaccgctttctgaacaaggccttgaactgacgacaatgccgtgttagacatcaatcccggcccgaccgctaagacggcgagcaaagaaatcacccaatagtgttttgtcttcatgttgtcattccttcctatatgaatacatgcgaaacacatcattttttgaaaacaaaagaagctaatagattttgcataccattagctttcattctaatattctccctttcaggggaaatgatattattttattataattatgtgaatgaatgagcatataatcaaatattatttcaaatcgattgtgttttgtcaatggagtaaatttcaagcacaacatagaaagcttgaaagcttttccccgatattgtgtctagaactgcacttatgaatccctgctcgttccctcaagcgaattaaagcaggccgttttaatcctttcaatccactattcccactaataaactcgaataagttggtgataagacaacattttgcccccacatttttttgtgttcactgggcgtttgccgcctctaaattgtatatgggtaaataccatgaattaacctatgaaataccaatgtaaggaaattctaaatattccgggaggcaaaaacgaatggaactgtatgagtgtatccaagacatttttagcggcttgaaaaatccatcggttaaagatttagcaacgtctttaaaaaaaattccaaacgcagcaaaattaagtcaaccgtatattaaggaaccagaccagtacgcttacggccgaaatgccatctatcgaaataatgaattggaaattatcgtgattaacattccgccaaacaaggagacaacagtccacgatcatggtcaatccattggttgtgcaatggtgttagaaggaaagcttcttaattctatttatcgctcagccggcgaacacgcagaactctccaattcatactttgtccacgaaggagaatgccttatttcaaccaaaggtttaattcacaaaatgtctaatcccacatccgaacgaatggtgtctcttcatgtctactcccctcctttggaagacatgacggtctttgaggaacaaaaggaggtattggaaaattcatgattgacagataaactgctcactttgacttcgctcaactggaggattcagagaatgaatcttttcctcaaaacaaaaaaacccttatagaataagggtttacaggtatggagccaagggggctcgaacccctgacctctacgctgccagcgtagcgctctcccagctgagctatggccccgtatgtaatgtcatgtttattatagatgattttattttgaaaaacaagctgtttcctcttgaattgacagaaaaaataaggctcgtaaaagagccttattttcgacttacatcatgatcaaaagtaaaatcacaccgagaataattcgatagattgcaaatgggacaagtttgattttgttaatcagccttaagaagaaacggacgacaaacagtgcgacaacaaaggcacagataaagccgacgatgaaaaatggcatcagatccgagcttaagctgtcccaatgcttcacgaggcttagaaagctggctcccatcatgatcggcatcgccataataaacgtaaagtcggctgcagctcggtggtttaatccgagaataacaccgccggaaatggttgaacccgaacgcgagaaacccggccaaagggcaagacattggaataagccgacggctatcgcctgtttataggaaatgcggtcgagtgtgtctgtcgctgttttccgtttattgacccagtcagcaaaaagcatgaggattgccccggcaattaaaccgatggccacagttttaacggaaaataaatattcatcaatgtaatcttcaaacaaaaagccgagaacagctgcaggcacgagtccgacggcaatttgggcaatgcttaatttatgtccctgctcctggtcgcttgtaatattttttttcaagcccagtaagtttaaaattcggtctttaaacacgatagctactgctaaaatggagcctagctgaataaccaccttgaatgagttagcagcttcttctgacatcagattacttgatttaagccagatgtcgtctactataatcatatgtcctgtcgaagaaaccggcgcgtactctgttaatccttctacgattcctaaaatggcggctacaaacaattcccatagagtcatgattttgattctccccattagacatttatttttttacataacgggagcttcccataaatggaaagcccgtcttatataactataaacgaaaatcacactttatgccccggcgtattttcatttttttcttcatcgtataaatgtgaccgcattttaaaccagtcaaataaatgtgtcgtaatgactttggcaaccgcatagccgggaatcgcaagaatgattccaacaacgccgaacagcttgccggctgttaacagcagaaaaataatcgtaatcggatggatgtgaaggttttttcccataatttgcggagagatcagcttcccttcaatcagctgaacaatcgtccaaacgatcaccagcttaagcagcatgagcggcgatgtcactatggcaatgataatcgcaggcgtaatggcaatcgttggccctaaatatggaacgatgcttgtgcaagccgcaatgactgcaagcaatgaagcataatccagcccgataatcaaataaccgataaacagcaaaaacccgatacagaagctgacaatgatctggcctctgatataagagcttaaccgatgattcatttcgcttaagactgtgtatgtctgttctttcaattgcgtcggaacaaacttcagtatgtagaccggcaatttttttccgtcctttaacaaatagaaaaggataaacggaaccgtaacgattgaaatgataatctcagtcagggcgccgataaaattcccaacgccggtaaaggtactgttcacaattgtcgctgcctgatctgaaacctttgttgcgagatcagatatattgatgttcgtcgtttgctgggcctgattgacgaagttgctgccgatcagctgtttcgtctgattttcaacgatatccacatatcttgggatgttgtcgattaaactcataatttgttcttttaagaagggaatgatcgacacgattgtgatcgtgatcagcccgataaccaatagatatagcagcaatatagaatagattcttcttattcttcttctctcaaggaaatcgacgaccgggtttaacagataaaaaacaatgcctgtcaaaataatcggaagtgatatcgttttgagcaaaacaataatcggggtgaaaataaatgatgtttttgtaaatactagaatatttaaaccaatcagcagcagcacaagcaaaaataaaacaaacttattatccaagaagaatcgcttgaatctgccgctccatgtttgcaacgtctccactatcgttcctccgtcatacatagtttaattaaattgtacactatcgtccctataatgaaaaataaaaaccgttaattgctggaaaagctttcacggttttaacattctatttatatctatcatgtgattttgttctttttaagctataatttagctatatcatgcaaaaggagcgatacgagtgatacgttttgcaataataggaaccaactggattacagaccgctttcttgagtcagcagcggatatcgaagattttcagctgactgctgtttattcaagatcggctgaacgcgctggcgagtttgctgctaaacacaacgctgcgcatgccttctcagaccttcaggaaatggcggcgagcgattgctttgatgccgtatacatagcgagcccgaacgctcttcacaaggaacaagccgttctctttatgaaccatggcaagcatgtgctttgtgagaagccgtttgcttcgaatacaaaagaaacagaagagatgatctcagcggctaaggcaaacggcgttgttctcatggaagcaatgaagaccactttcctgccgaatttcaaagagctgaaaaaacacctgcataaaatcggcactgtccgcagatttaccgcaagctactgccagtattcctcacggtatgacgcgttcagaagcggaactgttttgaatgcgtttcagcctgagctttccaatgggtcattaatggatattggcgtctattgtatttatccggctgttgtgttgtttggcgcgccgaaggatgtaaaagcaaacggatatgctttatcctccggagtggacggagaaggaactgtcattctgtcttacgacgggttcgaagctgttctgatgcattccaaaatctctacttcctatgccccggctgaaatccagggtgaagacgggacgattgtaatcgatacgattcaccggcctgaacgtgttgaaatccgctaccgggacggccgccttgaaaacatcgcgatccctgatcctaaaccagcgatgttctatgaagcagaagaatttgtcacgctcataaaagagaataagctggaatctgaagaaaatacatttgaacggtctttgaccactgcaaagattatggaagaagcaagaaagcaaatggggattgtataccctgctgatcaagcttaaaaaaatccgcccgcgtgcaaatgccgcggcggattttttattaggcaatcggagaagatgccttcctttttaaaagcacctgttgctcatattctttgatgtcatgaagccatgcctcttttaccggaacgcccatttgctcacagtaggaatcccagatggctccgaaaggatatgttttgaattcctccatcagggccagcctttctgtatagcggccctcttcctgcaattgttttaaatatccgttcgggagaagcagggcatacaataaagctttgatcatatttctcgttccgatggtccaggcggctacacggttaatgctggcatcgaaaaaatccagaccgatggcgaccttctcaagagcatgatttcgtacaatttcaagagcgatttctctcaattcatcatccaaaaccactacatggtcgctatcccaacgaacaggccgcgatacgtgcaaggcaagcttgtctgtgtaaagcagcatggacgagatcttgtttgataccgtctcagtcggatggaaatggcctgtatcaagtaaacaaagcttatgattcgtcaaagcataagctaaataaaattcatgagatccgacaacatatgattcggagccaagcccgaacagcttgctctcgattgcatcaagattgtgttgttcactgatctcctctgcgaagatccgatccagtgattcttttagtcttttacgcggtgtcagcctatcactcgggatatccttatagccgtcgggaatccaaatattcgtcaagcaaggtgttcctaattctttcccgaagtattccccgatacggcggcaagcgatgcaatgcctgatccaaaattctctgatatccggatcagggtgtgaaagggtgagtccgtcagccgctttctcatgcgaaaacaaggttggattaaaatctaaaccgagaccaaggttttttgcccatttcacccagttttcaaaatgctgcggcttcaattcgtcacgttctaccgcttccctgtttgtttctgcgtatatcgcatgcaggtttacgcggtgctttccaggaatgagagaaagagccttctccaaatctcttcttaattcttcaggagtttgcgcttttccgggataattgccagtcacgtcaattccgcctgaaagctcgcccttatttacttcaaagccttcaatgtcgtcaccctgccagcaatggatcgaaatgggcacttgctctaattgccgaagcgcctcttcaacatcaattccccatttttcatatgcctgttttgcactgtcataattggcttttatggtcatacggctctctccctttatcagttttttaatccaaataaaaaacttcctttagatctatcgaaacaggactgaaatccgaatttgttttcattaatggcgccatcgatttccaccatcttcggcaaacttccgtgtccgccatctttctccatttctcttcatcctctatttctaaatatgcaaaaagcctgcctgtttcctcgtctagaaaaatggaataatggtgtgctccatgagctttgagtgcttctgccatctcaggccaaatgtcatcatgccgctgtttgtattcttcgtacttgtcttgatggacaaacatgatactggcttttcttttcaaaccttttcacctcttcatcatttagatagcgctttcaaaacagtttgctgaaatgactgaatgatcgtgcttctgtcaatgtctttaggtgtaaacactttgatcggaaaggaatttctgacgacttgccgggcttcttttatgtctttgacttctttggcagcaatcatttgcatcaaaagatttccggtggcagttgcctctatcggccctgcatataccgcttttccactcatgtctgccgttaattgatttaagaaatcattccgggctccgccgccgatgatatgaaattgctcgatcggtttttctgtgattgtttcgagctctttgatggctatcgcatagatgatggctaaattgctgtagatgcagcaggcaagttcgcctgcagtgcgaggagtcttttggcgggtttgtctgcaataatgttgtatttcctttatcatgttttctggattcaggaaacgtttatcatttaagtttataaattgctggaatggttctgtttttttggcttcttctgcaagctgctggaaagagtaatctgcttgtaactgttgtctgacttcttgtatcacccacatgccgataatgtttttgagaaagcgaatggtgttgtttgcgccgcgttcatttgtatagttgttttctaaagcaagatcagttattatcggtgttttgttttcaaccccgattaacgaccatgttccgctgctgatatacgcccagccatcatttattcctggcgctgcaatgacggccgaggccgtatcatgtgttgcgactgtcatcaccttgcacgccgggagatcataatccgggaaccactcatttcttagcttcccgagttcacaccccggttcagtcagcggggcaaattgctgttcctgaacggacacggcttcaagcaattcaggatcaagatttcccgttgaggcttttaaaagctgtgttgtggacgcatttgtgatttccgttacagcttttccggttaaacaatagcctaaataatcaggaatcatcataattttgtctgtctttatcagcagctcacggtcttcctcatacaattgatagatcgtgttgaaaggctgaaattgtattcctgttttttgataaattgcggcttttgagagggtatgttccagtttgtctattgtgtgatctgttcttctatcacggtaggagattgcttcccgcaaccgatcgcctttttcgtccagtaagacataatcaactgcccatgtatcaatgcctacggtgcagtgttcatacccaagcgtctttactttttgcagtccttgcaggatttgttttagcaaatgatcaatatcccaaaagcaatgcccgtctctttgactgaaaccgttagcgaacctgtgaatctcttgtatgtcaagcttcccttcattcagttcacctaccatgattctcccgcttgatgcgcctatatcaatggcagtataaatcatcctttcaccctctcttcgaaagaggaacagctgtcaccttcacctttttgtcctcaagagcttttaccgatgccggatcaagtccagaatccgtaataaggcggctgacatcttgcagcgaggcaatatgtgaaaactcgcggttcccccatttgcttgaatcggccatcaaaatggtctggtccgacctttcgatcatccgttttttgagcagcgcctgccactcatttgaatcactcatcccgttgtgtacgtcaaatcccttacatgacagaaaggttttattgacatgataggtctcaagtgaacgctctgctaacggaccggcaaatgataatgatttttccagcaaaatgccgcctgttgaaatgactgatatgttttctttattgctgagttcaatagctgctttcattgagtttgtaatcacggtgagctcaatgtcagggagtatttttgccatgtaccaagcggttgtgcttgcatcgagaatgattcggtctccgctttttacatatttggccgcttcgtgagcgatggcttttttttcgatgacattcgtgatttcccgttcagaaaaatgaatttctgattccttctgctgaatactgaccgctcctccgtggctccggctcagtttatgttctttttcaagcttttcaagatcacgccgaatggtttcctctgtgactgaaaatatgtcacttaattcggaaacgcggatgcttgaacgcatatttactatttccactattttttgctgccgttctgctactagcatcggtaacgcccttcctcatatcgtagtccgtcttatattttttatcatagcatatttctaacgcgtaaaagcagcagggacgccgccgtctaccgtgatcatgcagcccgttgttttttcggctttggaagaagcgaagaatgcaatggcttcggcaatatcctccgggtaaatattgacgagcaatgctgtccgtttccggtaatgttcctccagctgatccggttcaatcccgtacgccgcggctcgttcctcccgccagcttgaaccccagattgccgatccttgaagaaccgcatcaggcaaaacagagttgaccctaatgccgaattctccaccttctgcagcaatgcatcttgctaaatgggtttcaagcgccttaaccgagctgtaggcagaggcgtttttgcccgcataaaccgaatttttcgatccgacaaataccatgcttccgcctctattttggtgtttcatctgtttaaacgcttcacgggctacaaggaaatagcctgttcctaaaacattcatattaagattccattcttttagacttgtttcgtcaaatgggcttgatgtggccagcccggcattattgacgacgatatcaatgccgccgtaagcaagcgccgctcgttcaaaagctgattgtacgtcttcctcctttgtcacatccattttgacagccattgcccgtccttctccgtatgcatcgtttatttccccggcaattttctgtgcaccttctatattcagatcagctacgatcacgtgccctccctcagctgcaaatcggcggcatgctgcactgccgattccgccggctcctccagttatcaacgctacttttcgggaaaattctgcttccggcggggccagcgtgagtttatatagttcgagcggccaatattcgacatggtaggattcattttcatgtaaagaaacaaattgccccagagcggttgctcctttcatcacggcgatggccctccgatataaagccccgcttactttagacatggcataactttttcctgtattcaccattccgattcccggaatcaatatcacccgtggggaggattcaaagatttgatccccatcctgctgatttcgtgtaaagtaagcctgatactctgatgtaaaggtctcgactcctgacttgatcagatctgcaagcttgtgcacatcttgagtttccggattccaatcaatgtacagcggaacccgttttgtgtgaacaaggtgatccgggcatgccgcaccgatttgcgaaagtgctggcgcttggacactgtttacaaattccaagacatcgtcatgatcatcataggaaaggatcattttcttttcttcacttactgctcctctgatcacaggcatgatgcctgccaagatttgttttcttttatcctccggcagcggctgataccttttgcctccgaatacctcatgctgattgatacgatcgttaacatactgctcggcttcttgaatgatggatatcgttttttgataacatgtttcagacgtctctccccaagtgactaagccgtgtttctccattaatataagctcggcgtggggattgtttgctacgccttcagcgatcattttagacaaagtaaatccaggacggacgtatggcacccatacaaaccgatttccgtaaatgtcttcagcgatttgttttccattatccgcacagcatatgctgataatcgcatctggatgggtatggtcaacatgtttgtatggcagaaaagcgtgtaatagcgtttcaattgaagggcggggatgtttgctgtctatcatacaatgagacaggtagtctaccatttcttcatctggcatttggtcccttttaatcagcgggcggatatcatctaatttcaaaccggtaaagttatgcgctttcattgttgccaaatccgaaccgcttccttttacccacatgacttctatttcacggcctctaaaatccttttccgttgttttcatagatgtattccccccgccccagttgcagacagtgcggtctgacccgatcagattggacctgtacaccaattcctctacacctttaggcagccgtgcagctcgctctgaatcccatatatgtttcgccatatttgatattcctccatccccttttatttgtatccgttttcattatatatgatttctgtttgtttttgaattgtttttgtttatttttgcttttaacaaaaaagaaagcagcagatatgccgctttcttgtttcattatgattctattttaaatttcttcgtaatgtcctgaagttcttccgccatgtttgccaacgtttccgctgaagagctgatttcttccatggacgcaagctgttcttccgccgaagctgcgatatcctgaatgcctgctgagctttctttcgccactgcagaaatatcttcaacagcacttgacacttcctgtgatccggctgacagttgttcaaccgtcgcgttcaagttttgcaattcgccggaaatttgggttgtcatctcatagatttgtttaaagctttccgctgtttgatccgtaatctgcaagccttctttcacttcatgattcacggattggaacattgaaagtgaggtgctgatttccctgacaatctcttgaattaatccttcaatttccttggcggagtctgctgattgtacagcaagttttctaacctcttccgcaactactgagaaacctcttccgtattctcccgctcttgccgcctcaatcgcagcatttaatgcaagcaggttggtttgatcagcaatgccattaatcacattcaagatgcttgtgatatcttgcgattttgtttcaaggcccttcacaaccgcttccgctttttgaacggattggtcaattgttttcatctggccgactgtatgctccaccagcttttctccgctgcccgctgcctcagaggactgaatcgatgatttcgtaatggttgaagaggcctgagccacttttgaaatcccctcgttcatttgagaaagatgatttgagcttgtttccagtttctcgctttgtgcctcgttgccatctgagaattgttcgatggcaagtgtaatatgttcagttgccttgctcgtttgggctgcgcttgccgtcagctcctcagaagatgaagcaacgttttctacagacgtttgaataacgccgattacagaacgcaatgatgcagacatttcattaaagctttcgccaagctggccaaactcgtttttcgagtgaatgtcaatgacttctgtgagatctccactgctgatttttgcagacgttgagacaagttttcttaacggcttggtgatggcacggataatatagagaatgagtatgccgccgattacaattgacacgcatagaatgataaccgcagtgttcagcaccggacttgaagcatcttgcaattcactgacaaaatatgtgcctgcgattttccagccagtcagtttatttgtcgtaaaggccattttcttttctttgccttcgaatatatattcaaatgagccttcttttttggaatatacttggtttgtccaatcgccggatccggttgtccccggcttaattgtcggatgggcgatatattttttgttgccagtcgtaataaatgcaaagccttctttaccgattttgattctttgtgatgcagtaagcacttcatccaggtttaaatcaagcgctataacccctgaaccgtcttttaattgttttgaaattgtgacaacgatatctcctgtcgcttcatcagtatacggttctgagaaaacagcttgtcctttttccgcaaccgcctgtttgtaccagtcacgtcctgtcggatcgaaacctttcggaacaccgctatccggatatttataaagcttcttatcttctgaagcagcatagattgcgcctacatcgtcgttaagtgtcgtgtactgcttaaatttctctttcagtaatgttttgtttttgcctaacaatatgtctttatcgactgtctcactataataatctattgcttttactttatcttctaatttattttgcagcgtactgtttagttcttcaacatttcccttcgcactgtttatgagctctctgtctaacgcgttccaagctgattgataactgaaatatgctaaaaccccaaccggcaaaataagcactgccagaaacgcagcgattagcggtttgctgatcgatggctgtttgatccaatgtatgaattttcccattcttgttgactcctcctttaagataaatctaatatcgtcaaactaggataaaaggtttaataaaaaaactaaaaaaaacacccaagcgtaacaagcttgggtgttaaggcttattattcgattttgaatcgtttggtcatatcgcgaagctcttccgccatagacgaaagggtctctgcagacgagctgatttcttccatggaagcaagctgctcttcggctgacgccgcgatatcttgtatatgcgctgaactttcttttgaaatcgatgcaatgtgctcagacgctcccgaaacttcttcggagctggcagaaagctgctgaaccgtcgcactcatattttgcagttcgccggcgatttggttcgtcatttcagaaatgcgtttgaagctcatttctgttttatctgtgatgtcaagtcctgtctgcacctcttgattgacagattggaacatgccgagtgatgtattgatttccttcacaatttcgatgattaatccttcaatctcttttgctgaatctgctgactgtactgccagttttcttacttcttccgctacaacggagaagccgcggccgtactcgcctgcgcgcgctgcttcaattgctgcgtttaaggcaagcaggttcgtctggtctgcgatgccattgatcacacgcaaaatgtttgtaatatctttcgatttcgtttccaatccgcgtacgacttgctccgcttctttaacggacttgtcaatgacattcatttggccgacggtttgatgaacaagcttgccgccttcacttgcaatttctgtcgattgaacagatgaatcagtgatcacttcagaagcttgagccatattcgtcaacccgtcattcatttgataaatgtgctctgctgccgtttcaatgttttcgttttgtttttcattgccgttagaaaattgttcaatcgccaatgtaatgtgctctgttgccttgctcgtttgcgcagctgatgcagtgagctcctcagaggaagcggcaacattatctacggaatcctggatggcgtgtatgagagaacgaagtgacgacgccatattgttaaagcttttgccaagctcgcccaattcatcttttgaacggatatcaatggtttccgtcaaatctccctcgctgatccgcttagaggaaccgacaagctgtttcagcggtgttgtaatcgaccgaatgatcaaagtcatgacgataatccctatgataatagctgcggccaagacaattaaagcaaggtgtaggacaggctgggctgcctcatggatttcatccaaatacatggtgccgccgatcttccatcccgtcaacttgtttgtgtcaaaggccatttttttcttatcgccatccatggtgtattgaaaatcgcctttatcagcactcaacatcttatcgagccagtcgccttttaattcagttcctgatttttcattaggatgagcgacaacttttttgtccttcgtcatgataaatgcgtagccttgtgtgccgatgttgacttttttggttgttttcagcagattttcaatggtcatgttgattgcgataacgcctgaaccatcttttgtctgctgggcgattgtcacaaccatcgtatttgtcgacgcggttttataagggtctgtgatcacgactttccctttatttgcaaccgcttttttgtaccagtcgcgttcaaccggattgtagccgcttggcatcggaagatccggatagcgggtaaagtgcccttttgtgtcacttgtataaatggattctacatccttgttaatgctgatatattgtgagaatttctctgcaatgcttgcattgctttttgcattgtatttctcttttgtcagccattcgctgaaataatcagcactgttttctttttcgccgatgctggtgttaatgatttcgtttaattgctgtacattttccaatgcgctccccatcatctgtctgtcgagtgagctgctagccgattgataggcaaagatcgccaatataacaaccggtatgatgaggatcgacagaaaggaaacaagaagcttccgtgtaattgatctttgttttatgagttggagtatttttttcatcattcatttctccttttttatgctacccttcatatcggctggaaatgggtaaatatatacagcaaaaaagaagaaatttaacaaaagtaactaatttcccataaataaatagtattttagacctattatttatctactttaaattgttttgtcagatcacggagttcttcagacattctttcaagcgtcagtgcagatgaactaatctcctccatggatgccagctgttcctcagctgaagcggcgatatcttggatgccatccgagctttccttagaaatggcagtgatatcatttgaagctgcggaaatttcttgagctcccgatgacagctcctcaaccgtcgcattcatgttttgcagctcggaagcaatttgattggtcatttgcgatatatgtttgaagctctgtttagtttcatccgtcatgacaagccctgtttcaacttctttgtttacggactgaagcacgttcagtgatgtgtgaatttcttttactatttcactgatcagcgattcaatttcttttgctgagtcagccgactgtaccgcgagctttctcacttcctcagcgacgactgaaaagccccggccatattcacccgctctggccgcttcaatggcggcatttaaagccaaaagattggtttgatccgcaatgccgttgatgacacgcaaaatattcgtgatatcctttgatttgatctccagccctttcaccacttgttccgctgattttacagaatggtcaattgtgttcatttggccggctgttttctggacgagtgtctcccctttacttgacacttctgttgaatctgcggatgtttctgtaatcactgctgcagcccgcgccagctctgccaatccgtcattcatttcattaatttgttcggttgtcgtttctattttctcgctttggctttcactgccgtttgaaaattgctcgatagccatcgtaatgtgctcagtggctctgcttgtctggtctgccgatgcagtcagctcttcagacgatgaggcaacgtgttctactgagtctttgatcccgtgaatgagcgagcgaagcgagtgtgccatatgattgaagctctcgctcagaacgccgagttcatcttttgaattgatttcaatcgtttcggttagatcgccttcactaattttttcagcggatgcgacaatgcgtctcaatggctttgtgatggatcgaatcacaaaataaatcgccgtcattccagctgcgatggcaatcgccagaacgattgaagccatgatcagaaccctgcttgcagcatcgtgaatctcgtttgcatacatcgtgccgctgattttccagcctgttgtttcgcttgttgcaaatgccatttttttctttttgcctttgtacgtatattcaaagtccccgcttttatccttgtagagcttatcaacccagtccccttttagctctgttcccgctttttctccggagtaggcgatgactttcttgttttggctcaaaataaaagcatagccttcttttccgatattgattcctttcgcggtagtgactaagtcatcaattttcatatcaatggcgacaacacctgacccatccaccgtttgacgggcgatggtgacgaccatttttcctgatgaaatcgattcataaggctcagtgacaattgttttgcctttattggccattgcttctttgtaccaatctcgttccaaagcattaaagtcacttggcatgtcagcgtacggataacgggtgaattccccgtctttgccgcttgaaaataccgcagcgacattatcattcatttggataaattgtttaaattcctgtttcagctctgttttctttttatcctgaaatttttcttctgtagcccaatcgctgaaatatgcgaggcttttttcagtcgtgctgattttatcatcaatgatgtgatctaatatctgaacattttcctttgcgctttgcgtcatctgtacatcaagtgaggcaactgctgattgataagcgctaaccgaaagggcggttatcggaacaattaagatcagcaggaaagaaataataagtctccttgcaattgatgatctgcgaatagtggtgagtgtttttttcatttccttttgaaccttctttcaataatttacaaattatatcggcggatcttcctttaaattacattgaaaatggaggaaaaaatgaaaaatagttctaaattcacctgttaaactaggactttattattgtttaccatataaaaaacagcgctttgatagcgctgtttttcggcttttactcgattttaaattgtttcgtcagatcacgaagctcttctgccatctgcgcaagagtggtcgctgaggaactgatttcttccatggaagcaagctgttcttcagctgatgcggcaatgtcctggatgcttgccgagctttctttcgacacgtctgcaatgccgctgactgctgctgaaacatgctgtgaacgatctgacagctgctcgacggtggaattcatcgtctgcagcttgcccgcgatttcgtttgtcatgctgaaaatgctctggaagctttcttttgtattgtctgtgacaacaagtccggactgtacttcctgattgacctctttaaacatgtgaagagaggtttcgatttctgcgacgatttcttggatcagcttttcgatttcttttgctgaatcggctgattggacagccagcttgcgcacttcctccgctacgacagagaagccgcgtccagactctccggcacgcgccgcttcaatggctgcatttagtgcaagcagatttgtttggtcagcgattccgttgatgactctcaaaatgcttgtgatgtcttttgattttccttctaagcctttgacaacagcttcagcctgctgaacagattgattaatcgagttcatttgtccgactgtctgctgcacaaacttctcacccgttccggcgatttccgttgattggatagatgcctttgtaatatctgacgatgtttgtgagacttgctggagtccttcattcattaagttcagctgatgagagctggattcaaccttttcgctttgctcctcgtttccgtttgagaactgctcaatcgccatcgtaatatgctcggtggctttactcgtctgcccggcagatgcggtaagctgttcggaagatgcggccacattgttcaccgagtcctgaatagcactgatcagcgagcggagagattgtcccatttcattgaagctttccccaagctccccaagctcatcctttgaatggatttcgatcgtttcggtcagatcccccctgctgatcgttttcgatgattgaacaagatgttttaacggttttgtaatcgaacgaacgataaacagaattaaaattccgcccgccacaatggaagcaatcagcacaatcattcctgtagtcagcacagactttgaggcatccttaatttcatccatatacattgtgccggctattttccaaccagtcagttcgtttgtagtataggtcatctttttatcttcgttattaagagtatactggagttcaccgctgtcattcgcatacattttggctacccagtcgcctgaaagcttttctccagccttatggttcttgtgggcgacataggttttgttttttgttgcaatgaaagcataaccttcttttccgaccttgatttgtttcatttgttctaacaatttatcaatggtaatatccatggcgacaacgccagatccgtccttcagctcctgtgcaatggtaatgaccatgcttccgtcactcgcagccacgtaaggatctgtcacgacaatttcaccgccggccttcatcgcatcctggtaccaaggccgttgtctcgggtcgtatccttccggcaatttttcttttggcgcttgtacataagtgccgttatctgcgcccccataaattctggctactccttgattaatagatacatattgtgaaaatttagctttgatctcttcttgattcgatttccctttgaatgcggaccttttaagagattcactgaaaaaggtgactgctttcgctttttctcccagatcatttgtaacagttgtattaaatgtatcgacactgtttttcgcatttcccataatttcctgatccagctttccgctggcgcttcggtaagagctaaattctaatataagaatagggataatgagaatcgcaataaatgagacgattaatttctttgaaatagacggtttcttaagccaattgataaaagtcttcatgtccacttgctccttcaggtttgatacagtatatatcggctgcttaaaaaagttttaaaataaaaaatggaagaagttctttttggctgtcttctgtcgttttaactttcattgcccaagctctttgcatatcttataaaaaacaaggggggctaaacatgattattgtatcaggacaattgctccgtccccaggatattgaaaattggcagattgatcaaaatctgaatccgctgttaaaagagatgattgagacgcctgttcagtttgattatcattcaattgctgaactgatgtttgagcttaaactgcggatgaatattgtagcagcggcaaagacgctgcacaaaagcggggcgaagtttgccacttttttaaaaacatacgggaatacaacgtattggagggtttcaccggagggcgccttggagctgaaatacagaatgccgccttcaaaagcgattcgtgacattgctgagaacggcccgttttatgcgtttgaatgcgcaaccgcaatcgttatcatttattacttggccttaatcgatactatcggagaagataaattcaatgccagctttgacagaattattttatatgactggcattatgagaaattgccgctctatacggaaacaggacaccactttttccttggagattgtttgtattttaagaatcctgaatttgatccacaaaaggcgcaatggagaggcgaaaatgtgattttactgggggaagataaatattttgcccatggtcttggaatcttaaacggaaagcaaattattgataagctgaattcttttaggaaaaaaggagccttacagtcagcctaccttctgtctcaggcgaccagactggatgttccgtctcttttccgcatcgtccgctaaaaagccccatcgcctattttccggacgatggggtttcaaatgcctttcgttttcgatagaagggggctgtgccgaaatattggttcgcagcccactccattttttcaaggtcatttcttgtcacgattggatcctggctgctccatttgataaagcggacaaaatagtagcctttgataggaaccattgtaacttttgagtgaggccagccttcaaatacaaactcaattttccctctttttttataagagtattgaagaatgttcatatttgtcacctcagtttatcaagttacgttcggcaaagctcggtacgtttacatccattgattgactatccctcatgcatgctttcctgaaaacaaagggtgaggcgcgtgtctctttccctcgctttttatttcgcatatggacgaatgccaagcgcgccttcattcgataaagcggcagccggggcgggtgtgacaagccctccggctatcggcgtttgttcagcgatcatgcttttgtcaaaaaaacagcctattatcccatcattttgatatagcatgtccgggtgcgagggccgtcaaattcgcagaaataaatgccctgccaagttccaagaatgagccggccgttttccacaatgacatgctgtgaagctccgactgtactcgacttcatgtgtgcagctgtattgccctccatatggcggtccagctcatgttcccacggatatacctcatcaaaccttctgagcatatcttttttgacgtccggatcggcattttcattaattgtaatgcccgcagtcgtatgcggacagtaaatcagcgctgcgccgctcgttatacctgtttcttgaagaaacgcttccacctcccgggtgatatcaatcatttcatctcgtttggttgttttgatttgcagtgttttcagcatttgtttctcctttcgtttgtccgctctcatcgcttaattcgttctgtgttcttttttttcctgttaaaccgctctcataaacccgataaaacaaaaaaactccagtctaaggctggagtttagcaccatagatatattcttgcttcatacggctttaagagtactgatgtcatatgcttgtgcggctctgtttcaatatttgacaagacgagtgcatctgatgacaatggcaatccagagtgcctgaacaacgccggtgttcctgtcagattggccgcaatcagtgcagtatggctctcgtttttccgaagatatgcaaagatttgctgatcttccggtaaaatgagctcgtatgtcccgttaataaaaacatcatatgtttggcgcagcttgatcaagcttttgtaaaaatggtaaacggatgttttatcgtttttttgcgcctcggcattcagccatttgtaattctcattgattccgatccacggtttggcctcagaaaatccggcgtatggacctgcattccattgcatcggcgttcttgaattgtctcttccctttttccagacaatcttcatcacatcctcgtgtgatgtgcctttcgctgtttttgtttcatacaggcgtttcattgcgacatcatcatagtcctcaatagagggaaaagccacgttcgtcatcccgagttcctgtccctgataaataaacggtgtgcctttcatgagaaaataaacagcggaaagcgcttttgcactttctttcaggtacactccgtcgtctccccacacagaaactgaacggggctggtcgtgattctccataaacaaagcattccagccgatcccttccagactgtcctgccagtcagttaaaattcgtttaaatgcaacgatatcaatactttcattgatctctacatcccacaggccgagatgctcaaattgaaaaatcatgctgaatatgccgtttttttctccagcccaatcagctgcttcttttgcagcgacgccgtttgcttcaccaactgtcataatcggatagcgggaaaatgtgttttccttcagctctgttaacaaatccataatgccgtcagcattcatatgataaggaaaggaagggacatagtccaatccctttggattcggcatgtcgggaagcccttcttttttcttaatatgcgtaatggcatccacccgaaatccgtcaattcctttatcaagccaccaattgatcatgtcataaacggcattcctcacctgttcattttcccaattcaaatcaggctgttttttatcaaaaaggtgcagataatactggcttgtcttttgatcatactcccaagccggcccgccgaaaatgctttcccaattgttgggcgcttttccgtttttgccgtctttccaaatataccagtcgcgcttttccgagtgtatggatgaacgggattctatgaaccatggatgttcgtcgcttgtgtggttcacaacgagatccataatcagcttcatccccagatcatgaatgtcaccaagcagttcatcaaaatcttccatggtgccaaactcgcttaatatgttttgataatcccggatatcatagccattatcagcattcggtgagtcatacagcgggcaaatccatatgacgtcagcgcccagctcttttatgtaagaaagcttggatctgattccttgaatatccccgattccgtcgccatttgaatctttaaaactgcgggggtaaatttggtaaacaacggtttccttccaccaagcctttttcatacagccactcctttccagtgtaccggtcttatatatcctatgtagaaaaaaggcttcacagcattgctttttaagaaatgacttgatgacacaaaaaacagccgtttgttccccggctgttttttatcaaaaatcagttttttttatttctacaaaacggatgtggtgatcttcggcgtcgaggattttaaattcacagccctccgcgtgtatcacatcccctgctttcagctccattttttgcgttagaagccagcctgcaatcgtatcaatttcttcattttcaatcgcaatgtcgagaaggtcattcacttcgtctattagcgcttttccatccatcacataatggtgctcgccctttttcaggatgtgcggtgtttcatcctgatcatactcatcgcggatttccccgacgatttcctcgataatatcctctacagtgacaagccccgccgttcccccgtattcatcgacaagaatcgccatgtgaatccgctccttctgcatgcggattaaaagctgctgaacaggaatgctttcaatgaccctgataacgggcctcatgatttgctccagctttatcggctggccgagaaaataagctttaaacatatctttgctgttgatgatccctaaaatatgatccttgtcatctttgatgacagggtagcgtgtataccgttcattaatgatgtgatgaattgcctcttcaagcgactgctccagagagataaccgcaatttctgtccgcggaatcataatctctctcgctacccggttgtcaaattcaaaaatcttatttacataacggaattcagactgattaatttctcccttttcatagctttctgaaaggatcagtcttagttcctcctcgctgatgacaacctgatgctcctttactgaatgaaagccaaacaatttcacaagaaaacttgcagagccgtttaatgctttaataaacgggtacgtgattttataaaaccagatcagcggctttgcaatccataagcttacagcttcagctttttgaatagaaaccgttttcggagcaagctcccccatcaccacatgcaaaaaagtgacgatgataaatgcaactacaaatgtgacaatgtggttaaacggttccggcatgcctgtcattgtaaataagggatgaagaaaacgttcaaatgtaggttcaccaagccatccaaggccgagggcagtaatcgtaatcccgagctggcaggctgataaatactcgtcaagattggagatgattttatgtgcggctagcgctcggctgtcaccgctttcgatgagctgattgatttttgaacctctgattttgacgatcgcaaattccgctgcaacgaaaacagccgtaatgccaatcaaaacaaaaatggcgatcaattgtaaaataagcaaaaaaagcccttaccataaatggtaaggggccacctccttaacgttaattctcatcacgaccgtttaagaaaatcatcacaaaacgaagtagttcaaacagggaaaccagggcggcggccacatacgttaaggcagcagcgctcagcactttatttaccccattttcttcattgtttcggatgaatccttctgacacaataatctgcttggcgcgtgaacttgcattgaattcgacaggcaatgtaatcagctggaaaaagactgccgctgaaaacagtatgatgccaagcccgatcaaattcaggctgccgagaagcatgcctcctaagaaaagcaaaggagctacaccggatgcaaaattcacgactgggaagattttatgtctcagcacaagcgcaccatatgactcctgatgctgcaaggcatgtccgacttcatgggaagctacggatatggcggaaattgagcggccgtaatagaccggctcagataaacgcaccacccgtcttgtcgggtcgtaatggtctgttaaagtgcctcttaccggttcgaccggcacgtcgtaaagaccgtttatatctaaaatccgtcttgccgtttctgcccctgtacgtccgcttgaggcttccacttttgaatatttttcaaagttgctctttactttaaattgtgcccaaaacgacaatcccaatgcggctattgttaaaaatataaacagcattttttcatcatcctttttccatgatcatttctctattaagattattttaatgagttttctttcccgtgtacagaaatgcgctttttcttccggcttggagcacagaatccaatcagcaaaaagaacaggcctgctgaaaacaaataaaaggcgaaaccgccggccagttctttcagaaaataaaaccaggagaagctgccggaaaagtgattatatgaattcaaatcgaaaataaacaaaatcaccgcggatgccgccagctgtgtaccgatcaaaaccacgatcgttctttgaaagatcgtcatctttttcatcctttttgttttagtttatggagaaatccggttttatatgttttgtacattttttgaaaaacatcaccggaagtgggacatactgttagaaaaaagcacgggtgtgatggaagctatgaaagtgacgagtgaggaaaaggaacagctgagcacagcaatcgaccgaatgaatgaaggactggacgcgtttatccagctgtataatgaatcggaaattgatgaaccgcttattcagcttgatgatgatacagccgagttaatgaagcaggcccgagataagtacggccaggaaaagctaaatgaaaaattaaatacaattattaaacagattttatccatctcagtatctgaagaaggagaaaaagaatgaaatcaaatcggatatttatttcatggctcaggtggccgttatttatccgaatcggggttattattttatgtctgattcttttgttcggccaaatcatttatatacttgagcctaagcagttcacttcggtattcgaaggcatttggtgggctgtcgttacggtttcgacagtcggttatggagactatgtgccgcacacgccgctgggacaggcagccggaatactgctgattttgagcggagcaagctttgtcacagcatatttcgctacgttatcagcggccgcattcagcagacagcatcgctacatcgaaggaaaagttgcttacaaaggccgggaccacatcattctgatcgggtggaatgaaaaaacaaaccggcttttgaaggaccttcagcttgccgccccttccaaaacggtcgtactaatcgatgaatccttaacagaaggcccgcttattgaaaacgttcatttcatacgcgggcacgctgccgatgatgggacactgaaacgggccaatattactgaagcggaatcagtgatgattactgccgatcagtataaaagtgaaactgatgctgatatgctgtcagtgctgactcttttatctgttaaagggcttaatccccttgcttactgcatcgtcgagattttgactgaccgttttgtcaccaatgcggagcgggcaggtgcaaaccaaatcatcggaacttcagaatttatcagccgggcgatgctgcagcattaccaagtcaagttacggccgtctaaacagcagaacggaatcaagctgacacttgatcagcatgtggagcttcttgctgttcctgacgaactaaagggagcggcttacaaaacctgtgttctctatttccttgatcacaacacaacaattataggcgtacaaaaagaggaggggccgatgatttcccctcctcttacatacaaggtgctcgaaacagatcaattccttgccatctagtgtaacagaacatcctccaattctttcacgagagaggcgccgatatccaaaaatgccggatcaatttccgcgtcccgcctttccggttcggaaaattgattaaacagtgattggaaaggccctccctcggcgtgatcgtcaacatccgcctgaaacacctgtctcagcataaacggcgttccgatccggacggccgcccctcgttcatcgagactgccctgtaccgcattgacgggaattcttaaaaataaatagccgtctctatcatcaattttataatcaaagtagccatgatcgtattcccagccgccgtttatcacataaccgagcggcttcatcacttgttccagttcttgaagcagaaaagactgcccatctatcgcggaaggtattggtatcatcagaatgccccttttttcacttatcctgtcccgccgaacaagacttcattcagaggcgcctacatggaaatcgttgtttctttcgcgcggccaacagaaaagaaagcgcattcaattaagaagtaaacagtcattgccgctgcaagccatacagctgaatcccaagacacataaacaaccgttgcatagagtcctaatttagtgaaaagagtatgggttcgttttaaatgcaaaatccgatgtaccgcatcggtaaaaagggcaagcggcaaaccaatgagaagaaaggcgtggatgaaaaaatgtgaaagcgtgccgccaaagcttgaagaaaactctgtatacacggcatcaaaggagataaggaaacttaaaatagctgcagaaaaaccggcaatgatgagatgtttaaccaattgtttcatgaacatcagcacctttctgattttataaaaagccgaccggcaaatgccagtcagctttctcacattaatcttccagacgtttttcaagctctgcttttttctcttcaaagccaggtttgccgagtaacgcaaacatattgactttatacgcttctacaccaggctggtcaaacggattgacgccaaggaggtaaccgctcatcgcgcaggctttttcgaagaaatatacaaggtatccaaaagtatatgcattcagctcaggaatgttaacgattaagttcggaacatttccgtctgtatgggcaagcattgtgccttggaatgctttcttgttaacgaaatcaacagttttaccggctaaatagttcaagccgtcaagatcgttatccgcttcctcaattgtcagttcatgtttaggtttctctacgttcaggaccgtttcgaataaatctctgcggccttcttgtacatactggcctaaagaatgaaggtctgttgaatagttcgctgaagaaggataaatgcccttctcatctttcccttcgctttctccgaacagctgcttccaccattccgcaaagtattgaagcgccggttcgtagttgatgagcatttcaattgttttgcccttattataaaggacattgcgaacaaccgcatattggtatgctgggttatcttccagttcagatgttgcaaaatctttgctcgcatccagggcgcctttcatcatgtcatcaatgttgacgccgctgacagcaatcggcaagaggcctacagctgttaaaactgaataacggccgccgacatcgtcaggaataacaaatgattcgaaaccttcttcgttagaaagcgtttttaatgcgccgcgctctttatcagttgttgcataaatccgcgctttcgcttcttctttaccgtatttctcttcaagaagcttgcggaaaatacggaaagcgattgcaggttcagttgttgtacctgatttagaaatcacattaatagagaagtcaacatcttcaagaagatccatgacgtctctcatataagatgaactgatgttgttcccgataaaaatgacttgcggattgccgcgttttgcttttggcaaagtgttataaaacgcgtgattcagcgcttcaatcgctgcccgcgctccaagataagaaccgccgatgccgacaacaagcaagacatcagagtcagatttgattttttccgcgctttttttgatgcgcgcgaattcttctttatcataatgttcagggaggtccacccagcctagaaaatcgctgcccgcgcctgttttttcatggatattatggtgtgctgtttttacaaagtcccgcaggtatgtaagttcatgttcgttgaagaaagtcaacgcttttgagtagtcaaagcgtacatgcgtcattgcttgtccctccataacggtataatgttttcatctttcactttatatgaacttatctgtgaaatcaagtcaagaagaaagggcggaatgactggattccgccctttgggtttatagagacgcgcgaaggatggcaagcacgtcatctttgttcagtttttggaagttgccgaagcccccgtgttccatttccttggctgcgatatcagcaatcagttcaagcttttcttctccaatattgtaatcagcaagacgagaaggtgcaccgaggcttgtccagaacgcagacagtttatcgattccttcaagcgcaatttctttatctgttttgccttcagtatcaatgtcaaacatgttgagcattaggtttttaaaacggcctacatttgtatcaagcgtgtatctcatccagtttgggaacagtatcgccaaaccgcccgcgtgcggaatatcatatacagctgaaacagcgtgttccattgtatgagaagcccagtcaccaaagtagcccatttggagcgtgccgtttaaagcaatagtaccagcgtacaaaatcgtttcacgaagtttgtagttttccagatcttcaagaagcttaggagctgtttcgatgaccgtctgcaaaacagcaaagcacattctatcctgaagcggcgtgttttcaacattatggaaatattgttcgaatacgtggctcatcatgtcaaccatgccgtatactgtttgattttctggaacggtgaacgtattttcagggtctaaaatagagaaacgcggatgagtgacattgctgccccatacaaatttctcgtttgtttcccagtttgtaatcacggaatctgggttcatttcagaccctgttgcagcaagagttaaaacagtgccaaacggcagcgcatcctccgctgttacttttttgctgaaaatatcccaagcgtcgccatcgtatttgacgccagctgcgattgcctttgtacagtcaatcacactgcctccgccgacagcaagcagaaaatcaatgtcatgctctctgcaaagtcctatgcctttttccactgttgcaagacgcgggttcggctctacacctgacagctcatgaacaacagcgccctcttcttttaaaatgcctgtgacttgatcataaaggccgttgcgtttaatgctgccgcccccgtaaacaagcagtacattcttgccgtattgtttgaattcttttcttaattgatcaagctgaccttttccaaaaatcagctttgtcggattataataagtgaaattttccatagtaaaacctccaaatgatgctggtaaaaaacagattttccattgtaacataagttgacaaaaagaaaaagggaagcagccaaacggctatttcccctttttttatagagatgctttcaaaattgaaagcacatcttctttgttgagtgatttaaattggccgaatgtaccgttagccattgccttgtcagcaattgtgtcaagctgctcatcattaatatcataatcagcaagacggttcggagcgccaaggcttgtccagaatgcggacagcttatcgataccttcaagggcaatttcttcatccgttttacctgcttcttcaacatcaaacacgcgaactgcaagctgtttcatgcgggcagggttttcagacaatgtgtgtctcatccagttcgggaacaaaattgccagtccgccggcatgcggaatatcataaacggctgatactgcatgttcaatattatgagtagcccaatcccctcttgcccccatagaaagcatgccgtttaatgcgattgttcctgtgtacaggatcgtctcacgcaattcgtaattttcgagatcattgatcagcttaggcgctgtttcaatgactgtacgcagaagtgattcacacatgcggtcctgatacggcgtgtttgatacatgatggaagtattgttcgaatacgtggctcatcatgtcaaccatcccgtagatcgtgtggtttttaggtactgtgaatgtattcaccggatcaagaatcgaaaatttagggaatacgagcgggctgccccagccgtatttttcttttgtttcccagtttgtaataacagatcctgagttcatttctgaaccagtcgcagcgagagtcaataccgttccgaatggcaaagcatcttttggctgatgctttttcgtaacgatatcccacgcatcaccatcatactttgctcctgcggcaatcgcttttgtacagtcgattacgcttccgcctccgacagccagcaagaaatcaatgttttgttctttacagatggcaacacctttattaacagtcgacacacgaggattcggttccacacctgctaattcatgcacggtcgctccggctttattcagctgttcaatcacttgatcatacaggccgctgcgtttaatgctgccgcctccgtacacaagcaatacgttttttccgtaaggtttgagttcctccggaagtctttccacttcgccgcgcccgaaaattaatttggtcggattccagtatgtaaagttttgcatgacatctcctccttagattttttattatgcagaatgtcctcaccacatgtaaagcaatcagctctcaccgatcagcataccagatggttttattttgcaagatgctgggaaagaagctgatataagcgagggcaggccagcctcatatggagaatgcatgtatagattctccaatatgtcacaatctataactgttttaataattcatggaggaggttgcaaaacatgagtaccattcaaagaatttgtcttgtattaaccatcattggcgccattaactggggactgatcggatttttccaatttgacttagtagcggctatcttcggcggccaagggtcagctctttcccgaatcatttacggacttgtcggaatcgccggcttaatcaacctcggtctgctatttaagccaaacgaggaaagatcacgtgaagaagcagcaaatcctgaaatgcgataggatatcaatcacgctgaaataggattttgtattaaatcaaaagcaccgaacattcctgtccggtgctttttttcatgcttattttttgataaggtctttgcggttggacatttcgatccactcttcaagcttatcttttaatgtgttgaaaccttgtggtgtagaagcttcttcgcttacttgagcagctttaggttttcttggtttgctttcttttttctcaggcgcagcttgtgtcgcacgaattgaaaggctgattttgcctttttcttcatcaacagcaagtacttttacttgtacttcgtcgccaactgaaaggtgctcgttgatatcttttacgaaaccgtgagtcacttcagaaatgtgtactaaaccttgagtttcttcatctaatgcaacaaacgcaccatacgcttgtaatcctgtaactttaccagtgtaaacactgcccacttcaaattttgctgccattcataacaactcctaagttaaattaaatatctgtttatacgcaatttaaaattatatcacacatgtcttatttccgcaaagaaaactttttcataaaaaaatcaggtttatgcacagcaaaaagggggtaaactgaaaataccaaaggctttctagtattcccccttttattggatgcgaacaaaaggttcgtatctttttttatattgttttgtgcaggaagcgtttcattctgactaacgcttcttgaagctgttcaatcgaggttgcgtatgaacaacggatatatccctcaccgctcggaccaaacacacttccaggaacaacggccactttttcttgcgtcagaagctcctcggcaaactgttctgaactcatccccgtgcttttaattgatggaaaagcatagaaagcgccgcccggatgatgacagctgagaccgatttcattgagcgattctacaaacagattccgtcttcttcgatagctttttttcattttttctacgtcttccatgccgttcttcaggccttcaagggcggcaaactgcgccattgcgggcgcacacatcatcgcatattgatgaattttaagcatggcatcccgaagcaaggatggtgccgcggcaaaaccgagcctccagcccgtcattgcaaatgcttttgaaaagcctgagatgactaccgtccgttccttcattcccggtaatgccgctatacttgtaaattcctcatcatatgtcagctccgcgtagatctcgtcggctaagacgatgacatcatgttttttggcaaactcagcaatctcattcagctcttccttcgaataaaccgaacctgtcggattcgatggtgagcagatgagaatggcctttgttttttcagtgactgccgcttcaaaatcagcagccgttgctttaaatcctttgtctgccgttgtatgaacgtgaaccgggataccgcctgccaaagaaacaagcgcatcatacgccacaaaacacggctcaggaatgatgacttcctcacctggattcacaatggcgcggatcgcaatatccaaagcctgacttgcccccactgtcacaatcagctcattatctggcgagtagctaagatcaaacctgttgctcaaataacggctgatttcctcccgcaatgagtataaacccgcattggccgtgtatgacgtatatccttgttcaagagagagaatgcttgcttcgcggacattccacgcggtaacaaaatcaggctcgccgacgcctaaagaaatgacgccttccatcgttgccgccaaatcaaagaatttgcggatgccggatggttttatttgttgtacatagtctgataaatacgaagtcatttacggtgacaccacgattcttttgtcgtcgtctcctgtttcaaacactttgccgtcatgcttgtattttttcaggataaaatgggttgtcgtagatacaactgaatcaagcgttgagagtttatccgaaacaaaacgcgctacgtcagacatcgaattgccgcgaatcacgacagacaaatcgtatacgcctgacatcaggtaaactgattcaacctcttggaatcggtaaatccgttccgccacttcatcaaaaccgacgccccgcttcggcgttactttgacgtcgatcatggccgtaacgccctcatgtccgtctacttttcgccaatcaatcatagcggaataatcgataataaccttttctttttccagtttgtcaataattgtttttacttcatttacagggatgcccgccatctttgcgattgtttctaaatcggcgcggctgttttcgtctaaaatttctaatatttctgtttctttttctgtcagtttcatttgattcacacctttgcaatgtcaagaaatctcatgacattatatcacgttttttgacgaatgctaagaaaaaacgaggagaaacttccgctagaatttacaatttcagggcataatacaaccatcaaaaaaagggagtgacacagaatggaggcggtttcaccaataaggcggtttacggtcgatggagtcaatgtatactacgaacattatcaaaatcccggcaggcaaacgctggtttgcgtacacggttttttatcatctgcattcagcttcagaaaagtaattcctctccttcgggacaagtacgacatcatcgcgcttgatttgcctcctttcggccaatctgaaaaatcaagaacgtttatctatacctatcaaaaccttgctaagcttgtcattgggattttggagcacttgcaagtgaaacaggctgtgcttgtcgggcattctatgggcgggcagatatcgctgtctgctgctctccaaaaacctgagcttttttcaaaggttgtgctgctttgcagttcagggtatttaaaacgttcacacccgacgatcattttcgggacccatatcccgtattttcatctttatatcaaacgctggctctcgaaagaaggcgtgatgaaaaatttattaaatgtggtgcatgacaaatcgctgattgatgaggagatgattgacggctatggcagaccgtttcaggacgagcagattttcaaagccatgacaaggtttatccgccacagagaaggagatttagaacccgagcaattgaagaaaatgaacaagcctgctctattgatttggggcgaggaggatcgaattgtcccaatggagatcggtaaacggctgcacgcagatttgcctaattccgtgctgtactcacttggccagaccggacatctggtgcctgaagaacggcctgaacttgtttctgaacacattgctgattttatcaattaaaaaaaccggtgctgaaccggtttttttaaggcgtgcaggagctgctgtttttaatgaataaaagctggccagccacttcccggcagctgtcgatcggcagcgtttgttcaaaagaagtttcaaatatttgctgaatgcttttcgccagcacgtcaggatcgtcttcatcatagactgcctgcacgacatcaacagcctccgtttcgtaaaactcttctccatatttaaacgggtcccatttggcaatgatcttaatcatttccctgaccgcttgactttcttccatattcatcaccgcttataataaaatttgcagttctatcttatcatagtgaagcttagaagaataaacatacatgagggggtaacagaatgaactttgataaacgagaagaacgccttggcacccaatcggtcaaatgggacaaaacaggcgaattatttggcgtgacagacgcactcccgatgtgggtggcggatatggattttcgcgcgccagaagcgataactgaagcgttaaaagagcgtcttgaccacggtatttttggttatacaactccagatcaaaaaacgagggatgctgtgtgcggatggatgcaaaacaggcacggctggaaggtgaatccggaaagcatcacattcagccccggcgttgtaacggctttgagcatggcggtacaagcttttacggagccgggcgatcaagtagttgttcagcctccagtttatacgcctttttaccatatggtggagaaaaacggccggcacattttacataatccgctgctagaaaaagacggcgcatatgcaatggattttgaagatttggagacgaagcttagtgacccaagtgttacattgtttattttatgcaatcctcataacccttctgggcgttcatggggccgggaagacttactgaagctaggcgaattgtgccttgagcatggcgtcacagttgtatcggatgaaatccattctgatttaatgctgtacggacacatacacacgccgttcgcttcgctctctgacgatttcgctgatatttctgtgacatgtgctgctccaagcaaaacatttaatatcgccggattgcaggcttcagcaatcattattccggatcgcctgaagcgcgccaagttttccgcaagccttcagcgcaatggtttaggcggactgaacgcgtttgccgtcactgcaatcgaagccgcgtattcaaaagggggaccgtggcttgatggattgatctcttacattgagagaaacatgaacgaagcggaagcctttttgagcaccgagctgccaaaggtcaaaatgatgaagccggatgcatcatacttgatttggctcgacttcagcgcttacggcttgtccgatgcagagcttcagcaaagaatgctaaaaaaaggaaaagttattttagagcccgggacgaaatacgggcctggcggagaaggatttatgcgcctgaacgcaggatgctctcttgcaaccctgcaggacggcctgcgccgcatcaaagccgcattatcgtaaatatagctgttaaacgcctttacgtcttcatttgtaaaggcgttcttaataaaggaattttatattttacttctaatatttagtgttataatagattcatattttatacgaaaggatttcacacgaatggaaattctaaaagactatcttctgcacatctgctttattttgtttcctattcttctttaccaagtgttttggcttggaaaacctgcgattcttgtgccaaaaataaacagcggtttggtcacgctcttcgcctgcggcgcctccgttttatgcattattttcccgattcatgaaatggactacatacaatacggccttcagatgattcccgttatcatttgtttattttacattagtaccgcttccggacttacagtcgccgcatctgtcctatgttttgaactgcttttttacgaaccttccgcaatgtttgttttcactttgctgccttttcttatcattatcccaatcttatttcagaaaaaatggccattcatgtccaaagcgaaaaaactgctgctgtctttattgatcagctgcgtggagattttcctatttttcgcctcaagctggattctttccgccttgaatattttaaattttcaaaaatcaggaattttcgtttacgaggcggcagtctcagggcttttccgctccagtgttcttctattaagcatctatattatcgaaagcatcgccgaaaatatcgccctgcgctcacagcttatccattctgaaaaaatgacgattgtgagtgaactggcagcgagcgtcgctcatgaggtcaggaatccgctgacagttgtccgcgggtttgtccagctgctttttaatgatgaaaccttacaaaacaagtcgagtgcagattacaaaaagcttgtactgtcagagcttgaccgggcgcaaggcattattacaaactatctcgatatggccaaacagcaattatacgaaaaagaggtttttgacctatctgcccttatcaaagagacaagctcccttatggtgtcgtacgccaattacaagtcagtaaccgtcgaggctgaaacagaaccggaccttttgatatacggagacgcaacaaagctgaagcaggctgtcatcaacctgatgaaaaacagtattgaagcggttcctcacggtaaggggatgatccacatatcagccaaaagaaacggccatacgatcatgatcaacatcacagacaatggggtcgggatgacagaccatcaaatgcaaaaactcggcgaaccttattattccttaaaaacgaacggaacgggactcggcctcaccgtaaccttttccattattgaacatcatcacgggaccatttcatttaacagcagcttccaaaaaggcactacggtgaccattaagcttcccgctgatcttcctcactagcaaatcgattggaactttaatagaataaatgcgaggtgatgacagatgagcacgtttgagacaggctctatcgttaaaggattttacaaaacaggtgtatacataggagaaatcacggcttgcaggccgcagcattatttagtgaaagtgaaagcggttcttacccatcccgctcaaggagaccttcatcatccaaaacaggcggatgtgccattttttcatgagagaaaagcgctcgcacatggtgaacagaccaatatcccccaccatatggtgaagccttatgacggtgaagtgccggattataccgaatctctgcgggaggcgacagcacagctgagagccaaattggatgaggatggttcggagtgggcaaaacgctcccttcataatctggacattttagaaaaagaatattttaacctgccataacccagtctgacaaaagattgggttttttacgtcgcgcgcttcaacagttcggttaaatcgattctctcgccgattgtgggcggttttggcttttcgagatactgcttatcctgctcaacaagcttaaaaagtttatatgctgtaagagcatcatcaagcgctttatgatgggtgccggttccggaatctccatactcttcggcagctttccataaacccgtcaatgtccggtctccaaaaaagtttttgtattcaagcgataaatctctcatttctcccttaaacgggaaagggatatggttaaacatacagttttgcttcagcactttcatatccatgtttccccacgtaataattgtgctgtttttctcaggatccagctcgtttagtttacggatgaaatcctcgaatctcattccttcgtctacctgtttttgggttatttttaaaaatgatttgcagcgtttcgtaagcttcgggaactttttcggtctaacatagctagaaaacgtctcaaccacttcatcatcaatcgactttacaattccggcttcaatgatttccgggaagaagttttgaggactgtactttccgtcaggcattgtaaattcgaaatcaataatgagtaagctgtttgtcgtcacctttttacacctgcctttcctccgatcagaaaatgctatctttatagtatatcaattccccttctcgacatttcttcattttctaaaaataatgaattttcccagccgcttcgtttcttttaaattgtgaatcgtttctttataattagtaaggaacccgaaataataagaaggtgatgttatttctatccgtaagaaaaactttgtcattgtgtggctggcgaacttttttgtctccgctagcacaacgatgatcgttccttttctctccttatacattgagacgctcagctctttttcaaacggctttgtgcaaaggtggagcggctatgtgttcggcattacatttctcatggcgttcttggtatccccgttttggggacggttcggagacaaacgcggatataagaaaatccttatggcaaccggaacgggcattgccctcagcattttcttcatgggctttgttacatcggtgtaccaattgttttttctgcgtatggcaatgggtcttgtaaccggattcatcccgacatctcttgcgatgatttcggcacagactccgaagagctcagccggcaaaacactcggcacgctgcaaatggggcaagtgtccggaagcttgttcggcccgcttttgggaggcatgcttgctgatcgtttcggctttacgtataccttttttatcacatcctttgtgattttctcgtctgttcttctcgtgttatttggtgtcaaagaaaagcctcttgcagagaaaacagccaaacgtacgtcttactcgaggaaagaagtgctatcctatatttttcaccagccggcgctgtgggtcatgatgctgttaaccatgctgattcaaacaggcaatttcagtatccagcccctgctcgctttatatgtaaatgagctgcatggacctgtcaatcttgcctttttctccggcatggcattttcagcaacggggctcggaagtttgctgctggctagaaaatggggtgatctgggcgaccgctacggccaccgccgcattttaatcggacttttgctcgccgcctctttcttttttattccgcaggcgctcgcgtcctcactcagcgtgctccttgttttcagatttttattcgggatggcgatgggcggtttgctgccatgcattacggcagcgatccgcgttcaggctcccggcagcattcaaggtgaagttctcggctacaatgtcagctttcgctttttaggaaacgtgctcgggcctctgctcggcggaatcatatcgagccattttaccatttcggccaccttttacgtcacggcgtttctctttttcgccggcgcctgcatgctttggatcatgcagaaacttcggaaagattcttatgccaaagcaagctgattccgagaaaaaactgaggaatcttctaaatttaaccttctcgtaatctcaaaagaatggtacgatatggctagaatttaggagaaaagagagtgaccatgttacgaaaaataatcggatggattttgctcctttgcataatcccattgtttgcatttacagttatcgcttccggaaaagaagtaaaacaaatgaagtccctggatcaggtgcttgataaaaatattaatctgaaagatatcagccttgttcagaacagctacatgtatgacagggacggctcccttgtctcggaaatcgtcagcgaccacgaaaaccgtgtgctcgttccatttaacaagattcccgaggaagtcaaacagattttcttaacatctgaggaccgccatttttacgagcataaaggctttgactttatgggaatggtgcgggctactgcttctaacgtaaaagacaagaaaattgaccagggtgccagcaccatcacacagcagctttcaagaaacttatatttgagccacgaacgctccttcagccgcaagctgacagagctcgcgtattcctatcagctggagaaaaaatatacgaaaaatgaaattcttgaagcttacttaaataccatttattttaacaatggtgtttatggcgtcggttcagcagctcaattctatttcagcaaaccgctgaaatctctcacagtgggagaaatggcttttatctgtgctatacctaataaccctacattatatgatcctctcaagcattttgactacacgaaaagccgtcaagaacgtttgcttaaagggctaaaagatgccggggtcattacggacaaagagctgaaaaaagccgtaaaacaaaaaatcaaactggatgttgaaaaaagagaagacaaatatcctgactacgtttcctacgtcaatgatgaattcactcagctggtgtctgaatcagaaggctttgataaacgccttcaaaaagcatcaggaaaacaaaaagaaaagatcgagaacgagctgtccgcaagagtcagcactctgatgaaagacggcgtgaaaatttatactgcacttgatccgtacatgcaaaatcaagttgtggcacaaatgaattccaagctcccgtatgcggacgtacagggcggagcggctgtgattaatcaccagacgcatcaaatcatcgctctatccggcgggaaaaactatcaaaaatatgactttaaccgcgcctaccaggcgtacaggcagccgggttcatccattaagccgcttcttgattacggcccttatattgaacagaccggcgcgacaacaagcagcaccattgatgccagcaagttttgcagcaaagactactgtccgcaaaactacaataaccgcacttacggcacagtgacgcttgatacggcgtttaaaaattcatataataccccggctattagaatgctcgaccgcgtcggcatccaaaaggcattcagttatattgagccgtatcattttgccaaacttgtcgacagtgactatcttcttccggcggcgcttggcggatttacaaacggcatgacgcctcttgagatgacaaaggcttatacgacattcggaaacagcggaagctatacgccgagccatgcgattacaaaggtgacagaccttaaaggaaaaacactttataaatggaatgataaagcgactcaaatattcagcgtccgcacgaacatgcagctgaaaaaactgatgtcttccgttgtgaaaagcggaacagggaaaaaagcatatttcaatgcgccttacatcggcggtaaaaccggaacatcaaatgattatcacgatatgtggtttgtcggcctgactgatacgtatacaatgggtgtctgggtcggaaaggatacaccgaccagcgttgaatatcttcacagcatcagccctcagctttccatctggaaaggaacgctgcaagcggcttattaaaggatcggaggggatatggagtgacttcagaacaaattccaaatcgcgttttgctgtttgacggtgtctgcaatttatgcaatggagccgtgcagtttatcattaaacgtgatccggacggattgatttctttcacatcgctgcagtcggaaacaggacagagcctgctgaaaaaaagcgggcttccgactgatcggtttgacagctttgtctttattgaagacggccaagtgtacacaaagtcaactgcagccattaaggttttcaggcatctgcgaggcccatggcggctcttcgtcctgtttttcgcagtgccgaagcctgtcagagatatggtctattcttttattgccaacaaccgctataagtggtttggcaaaaaaaatgaatgtatgctcccctccccttctattaaaaaaagatttttaccgtaaataaaaaatggctaggaagctagccaacacagattgttgacaaaatcctaaaacggcttcgttttaggattttgtcatcttttcagcgtgattgaaaacctttgaagtcgacgaagagcgagcattggatgtgaaacggcaggaacctgagaatctagccgccgttttattgcgtacagagcacgaagcgcaaatctgaccactaaacgctgaaatggctagcttacacaggtaagctagccattatgctattataaagcttgataaatatgaacagaataccgataacaaaggtaaaccaaaacagcagttccaatagaatgaatccaactaatgacatgagagaaagcgtcgaataaatccggtacacggtaaacacaaagtaagcgagcgtgacgaccgcaaaccagatcacaatccaaatgacattttgcaagagcacaaaggataaaatcccgccgcccaaataaatcatggaacccattctgagttttttcaggttgttcccttccggatcattagcaaaaaacagcaatgacagctcggtcacggtatttgcaattaatttcagagcggacagaaccataaaatataaaagtgcaaaggcagcaaataacgcaagcctgattcctttctctgaaaaataatcgagcattccatcatacattccaaatgaagacagcatcttcaacgcataaagtgaagttgagatggataaggacgaactaaaaagcaggatcgcaatcagcggaaaatatcctgtcaaataagtatttttcatataaaaaagtccctttctataatctacctcatttattatggaggacttaaaacacattgacaagataaattattccattttttctcctttttacgaattacggtcccaaatcttcacaaagcagcattttgagagtaaagtagtacgcaggaatcataaaacgtaaggaagttttatatgaaaaaaacattaaaactgcaaaccagactcaccatatttgtttgtatcgttgtattaatcgcattgctcattacgttttttacagtcggtgcccaaaccaccaaacgaattagagatcaggaaaaggccactgcgctgcagactgctgaaatggtagctgaggcgccgatgacagccgctgctttagaaagcggaaaaaaacaaaaggaactgcagagctacacaaagcgggttcagaaaattaccggcacggaatttgttgtcgtcatggatatgaacggtatccgcaaaacccatcctgacccgagcaaaatcggaaaaaaattcagaggcggtgatgagtccgaggtattaaaagggcatgtccatatcagcacagcctctggcacgctcgggaaatcgcagagagcgttcgtccctgtctacgcggagaatgggaaacaagtcggtgcagtcgcggtcggcatcaccgtaaatgaaattgatgaagtgatcagccatagcttacggccgctttactttattatttgcgtcagcatcttcgtcggtgtgatcggagccgttatcgtcgcccgtacagtgaaaaatatcatgtacggacttgaaccttatgaaattgcgactctgcttgaagaacggagcgcgatgctggaatcgacgaaggaaggaatactcgctgtcgatgaacatggcaaaattaaacttgccaacgcggaagcaaaacgcctattcgtcaaaatgggcatcaacacaaatcccattgatcaggatgtagatgacatcttgccgaaaagccgcttgaaaaaggtcattgagacaaaaaaacctcttcaagacagagacgtccgcattaacgggctggagcttgtgtttaatgaagttcctatccagctgaaaggacaaactgtcggagcgattgcaacattccgcgacaagaccgaggtaaaacatttagctgaacagctttccggtgttaaaatgtatgcaaacgcactgagagcgcagtctcatgaatttatgaacaaactgcatgttatattaggtctcgtccagctgaaagagtatgatgatcttggagattatattaaagatatagccatacagcaaaaatcagaaacaagtgaaattataaatgatgtcaaaagctccgtactggccggttttctgctcggaaagcaaagctttatacgtgagcagggcgcaaatcttgatattgaatgcaacggtgtcatcccgaacgcggcagacccttctgtcatccatgaacttattacaatcatcggaaatctcatcaacaatggcttagacgccgttgccgatatgccgaaaaaacaaatcaccatgtccatgcgcttccataacagcatacttgatattgaaattaccgatactggagcaggcatgtctgaagaagaccaagccaaagtatttgaacaaggctattcaacaaagggcaaaaaccggggattcggcctttatttcacacagcaaagcatcgaaaatttaaaaggccaaatgatcctcacaagcgaaaagaatgaaggaacgacattcagtattcgcatcccgtacgaaccgaaggaggaaaatcatgattaatgtactaatagttgaagatgaccccatggtgggtgaattaaataaacgatacttaagccaaatagatggctttcagctgaaaggcatcgcttcttcctttcaaagcgctctgcatattttaggcgagcaccatatcgacctcattttgcttgatatttatatgccgggaaaaaacgggctggaactgctgacggaattgagagcccaaaatgaagcggttgacgtgattgtcatctcagcggccagcgagcttgacgtaatcaagaaaacacttcggtacggagctgtcgattatttaatcaaaccgtttgaatttgaacgtttccaaacggctctgtctgattacagacgaaaacaaaaggtgtattcaacccatcgcaacatgagccaaaaagaactggacgccgagctttttcaaaagaaagaagcaacagaaaaagtgcagcttcctaaaggcctgacaaaaagcacgctgaagctgatctggtccagtatccagtcatttgaaaatgaatcttttacgacagaagacttggcaaagcacacagaaatctctcaagtatccatacgaaaatacttaaagtttcttgaagatatacaagttctgaatgtagaaatggcgtacggaacgatcggaagacctgtgtttcagtacaacgtaaacaacagtaaccttaacggaataaagcaatatctataagaaaacgcactgcttgctttgagcagtgcgtttttctgtcatatctcttgccaagatgcttgattctattgttgataagttatacaagaataacaaagggctttcacatttttaagcaaataattctaaaaatagatactttttaaaaaattatgcgaaattctatttatttcttattagttaaatgataaattatgattggttagttgatcccgaaaaactaagtcataagtcttacttcagaaaacgatgtcacggttttccgcccggaacgccttccgcatccttctcttccccgcctttcgaaggaaatactcacaccacgcttattcagggaagaatagaactgtctcagcgcattccatttgttattatcagaaaattttatcgattctaagaaattgttcaggacagcccatcacatgactggccggatcagctttgaaccaaatttttctggggggttatatcttgaataaacgaaaaatcggattggcgatgtcacttgtgatcgcagcaggcaccatattaggagcatgcggaaacagcgaaaaaagcagcggctcaggcgaaggcaaaaacaaattcagtgtggcgatggttactgacgtaggcggagtggatgacaaatccttcaaccaatcagcctgggaaggcatccaagcctttgggaaagagaatgggctgaaaaaaggcaaaaacggttacgactatcttcaatccaaatcagatgcagactatacaacgaacttaaataaattggcgcgtgagaattttgacttaatttacggcgtcggctacttaatggaggattcaatcagcgaaattgctgaccagcgcaaaaatacaaactttgcgattatagatgctgttgtcgataaagacaacgtcgcaagtattacgtttaaagagcaggaaggctcatttctcgtcggagtggccgcagccctatcaagcaaatcaggaaaaatcggctttgtaggcggcatggaatcagagttaatcaaaaaattcgaggtcggcttccgtgccggcgtacaagcagttaaccctaaagccgttgtagaagtgaaatacgcaggggggttcgataaagccgatgtcggcaaagcaaccgccgaaagcatgtataaatcaggcgtagatgttatttatcactctgcgggcgccactggcacaggcgtctttactgaagcgaaaaacctgaaaaaagaagatccaaaacgcgatgtctgggtcatcggtgtcgataaagaccaatacgcagaaggccaggtagaaggaacagatgataacgtcaccctcacttccatggtgaaaaaagtagatacagtcgttgaagatgtaacgaaaaaagcgagtgacggaaagttcccgggcggcgaaacacttacctacgggcttgatcaagacggagtcggcatttctccatctaaacaaaatctatcggatgatgtgatcaaagcggtcgataaatggaagaaaaaaatcatcgacggattggaaatcccggcaactgagaaagagctgaaaaccttcaaagctgaataagaatcgcagggataaggaggtcgagcccttatcccttgtttttcttttattttgaaataaaggagcggtcaatcaatggaatatgtcattgaaatgctcaatatccgcaaggcgtttccaggtatcgtcgccaatgacaatatcaatcttcaagtcaaaaaaggcgaaatacacgcgttgctcggtgaaaacggagcggggaaatcaacgttgatgaatgtccttttcgggctgtatcagccggagcggggtgaaattcgggtgcgcggcgagaaggtgcacatcaacagcccgaacaaagcgaatgaacttggaattggaatggtgcaccagcactttatgcttgttgacacctttacagttgctgaaaatattattctcgggaaggagccaaagaagtttggcagaattgaccggaagcgtgctggccaagaggtgcaggacatttccgatcgatacggcctgcagatccatcctgaagcaaaagcagctgacatatcagtcggtatgcagcagcgcgcagaaatattaaaaaccctctaccgcggtgccgacattctgatttttgatgaaccgacggctgttttgacgcctcatgaaattaaggaactgatgcaaattatgaagaacctggtcaaagaagggaagtccatcatcttaatcacccataagctgaaagagattatggagatttgtgaccgcgttacggttatccgtaaaggaaaaggcatcaaaacccttgatgtccgtgatacaaaccaagacgaactcgccagtctaatggtcggccgcgaggtatcgttcaaaactgaaaagagagctgctcagccgggagcggaagtgcttgcgattgacggcataactgtaaaggatacccgcggaatagagacagtcagagatttgtctctttctgtcaaagcgggagaaatagtcggcatagcaggcgtcgacggaaacgggcaatcagagctgatcgaagcggtgacaggactccgcaaaacagattcaggaacaatcaccttaaacggaaaacagatccaaaacctgacgccaagaaaaatcactgaatccgggatcgggcatattcctcaggatcgccataaacacggtctcgtccttgattttccaatcggagagaatatcctgctgcaaagctattacaaaaagccgtattcagcattgggcgttttacataaaggcgaaatgtacaaaaaagcacgcagcctgatcagcgagtacgacgtcagaacgccggatgaatatacacacgctcgggcattgtcaggcggaaaccagcaaaaagcgattatcgggcgggaagtagaccgaaatcctgatttattaattgccgcccagccgactcgcggccttgatgtcggagcgattgaatttgtccataaaaagctcattgagcagcgtgatgccgggaaagccgttcttctcctctcgtttgagcttgaagaaattatgaatctcagtgacagaatcgccgttatttttgaaggacgcattatcgccagcgttaatccgcaggaaaccactgaacaggagcttggtctcttgatggcaggaagcacgcaaaaggaagcggggaaagcaaatggttaaacgactctctcatttactcgtgccgctcatcgcaatcatccttggtcttgcggccggcgcgttgattatgcttgtgagcggctacagtgtggctagcggatattcggctttgtggaatgggatattcggagaaatctattatgtcggagaaacaatccggcaaattacgccttatattttatccggattggctgtcgcctttgcattccgaaccggactctttaatatcggcgtcgagggacagctgctcgtcggctggacagcagcggtttgggtcggtacggcgtttgacggaccggcatatattcacttgccgctcgcattgattacagcggcagctgcaggaggattatgggggtttattcccggcattttgaaagcgcgattttacgttcatgaagtcattgtcaccattatgatgaattatatcgcgctgcacatgaccaattacatcatttcaaacgtcttgacagatcatcaggacaagacggggaaaattcacgaatccgcctccctccgctctccttttcttgaacagatcaccgattactcacggctgcatttgggaatcatcgttgcccttctcgcagcagttatcatgtggtttatcatcaacaaaactacaaaaggatttgagctccgggcggtcgggtttaaccagcacgcttcccagtatgccggcatgagcgtgcggaagaatatcatgacctccatgcttatctccggcgcttttgcaggccttgccggagccatggagggcctagggacattcgaatacgcagcagtgaaaggcgcatttaccggcgtaggctttgacggtatcgctgtcgctcttctcgggggaaacacagccgtaggcgttgtactggcagcatgcctgcttggcgggctgaaaatcggcgcattaaatatgccgattgaatcaggcgttccatcagaggtcgttgatattgtgattgctattattattctatttgtggcttcaagctatgcgattcgtttcgtcatgggcaaattgaagaaaaagggggcgaactaagtggacattgtgcagattttatctatcattgtccctgccacactcgtctatgcggccccgcttattttaactgctctcggcggcgtgttttccgagagatcaggtgtggtgaatatcggcttagaaggcctcatgattatcggggcgttcaccagcgtgttatttaatttattttttggtccggaattaggtgccgccgcaccttggctttcgctccttgccgccatggcagcaggcgccctgttttcactgattcacgcggcagcggcgatttcgtttcgcgccgaccagacagtcagcggtgtcgccattaacatgctggcgcttggggcaactttatttatcgtcaaactgatctacggcaaagcgcagacagacaaaattccagagcctttttataagacgaaaatccccggtttgggcgatattcccgtcttgggaaaaatcttcttttcggatgtctattatacgtctattcttgcaatagcacttgcctttatttcctggtttatcttattcaaaacgccgttcggccttcgtatccgttctgtcggcgagcatccgatggcggccgatacgatgggaatcaacgtatataaaatgcgctacatcggcgtgatgatcagcggattgttcggcggtctcggcggcggcgtatatgcctccacaattgcgcttgatttcacgcactctaccatctccgggcaaggttttatcgccctggcagcgcttgtattcggaaaatggcatccaatcggagcactgggggccgccctgtttttcggattcgcccaaagcttaagcatcattggatcactgctccctctttttaaagacataccaaatgtgtatatgctgatggctccttatgtcttaacgattctcgctttaaccggctttatcgggcgggcagatgcgccaaaagccaatggcgtgccttatattaaaggaaaaagataaaacattctcccctgggaagacgattctcaggggtttttttctaatccaaaagacccccttaatttaattgtttattagttttttaacttaaaaaaatatgaagtgttaacgctttcttgtagactgtaacaaacaatacatgggggtgtatgacatgggagcaattccaaaaacggggacaatttcacctgagcaaaaagactcacaggggaaaaacctgtttcaaaaaatctggtcttgggaaatcggtgtgattcctctgcctttatacacagtattagctgttattattattcttgcagcctattacaatgagctgccggcaaatatgcttggcgggtttgccatcattatgattcttggtgtgtttctcggagacataggccaacgcataccgatattgaaggatattggcggccctgctattttatctttgtttgttccttcatttttagtcttttacaatgtactgaattcaacatctttagacgctgtaaccaacttgatgaaaacgtctaacttcctttatttctatatcgcttgccttgttgtgggaagtatcctcggtatgaacagaattgttttaatacaggggtttatcagaatgttcgttccactggttgcaggaacgatcgcggccgttgcagccggcatccttgtcggatttatttttggctatagtgcctatgattcctttttctttgttgttgtcccgattattgccgggggaataggcgaaggaattttgccgctttcaatcgcctactcacaaatactgggctcatctgctgatgtatttgtgtctcagctggttccagccgcaattataggaaacgtttttgctatcatatgtgcagccttaatgaaaaagcttggcgataagcgtccagatctaaatgggaacggacgtctcgtaaaatctaaaaaagcaaatgagattttcaatcaaaaagaagccgaagcaaaaattgattttaaactaatgggagcgggagttctgctcgcgtgtacattctttatttttggcgggttattggagaaattcatcttcatcccgggcgcgatcttaatgattatttcagctgcggctgtcaagtatgcaaatattcttccgaaaaaaatggaagaaggcgcttaccagctttataagtttatttcttcaagctttacatggccgctgatggtcggtctcggcatcctctttattccgttggatgacgtagcgtctgtgatttctataccgtttgtcatcatctgtatttcagttgttatcgcgatgattggttctggatatttcgtaggcaagctgatgaacatgtatccggttgaatccgcaatcgttacctgctgccacagcggtctcggcggaacgggtgatgttgccattttatcggcatcaggaagaatgggccttatgccgtttgcccaaatttcaacccgtctcggcggtgcaggcacagttatttgcgcgacagtgctgcttcgttttttcacttcataaacagaaagagttccgttttatgcggaactctttttttatttattcacaatccgaatatactctcggggaccaaacggcagatcctttgattccatctcactcattctggctgacaggtggtgctccagtaaatacagctcccactcatcactagccgccacaccgctgcgcccgtcatattgattcaacatgaatgcccctgcaaatactgagcagaataaacctgagcacatcacgacttttcttttcacatgaccagctcctttccttcagcttgatcaggattgattttaaatatacaaataacctcttttttgttagacttattttgaggtcaaaagaactcataaaaacccattacagcagttcgaagcgtggcagcttgcagaaaagtgcgatataatttggactaggtcgtttgaccgtatatttcatacatagcgcatttttcaattgagaacgagaaaaggaggtcttatctttgcagctcttacatcttgctattttatcgccttttttatttgcttttatcattcccttcttggcaaaatacgcaaaaagagtgcatacgggctggtttgtgttgatcctgcccgtcttgctgtttatatactttctcccaatgatcaggatgacacaatctggagaaacacttcgatcggtattagagtggattccgtcactcggcattaactttaccgtttatatagacggcctcgggttattattcgctttactgatcacaggcattggctctttggtcactctttacagcattttttatttatcgaaagaaaaagaacagcttgggcccttttatgtctacttattgatgttcatgggcgccatgctcggtgtcgttctagtagacaatgtcatggttctctacatgttctgggagcttacaagcctttcatcctttttgctgatcggctattggtataagcgagaaaagtcgcgctatggcgcagccaaatcacttttgattacggtcagcggcgggctgtgcatgctcggcggatttattctcctttatttgataacggattccttcagtattagagagatggttcaccaggttcaattaattgccggccacgaattgtttatcccggctatgattctcattttattaggggcttttacgaaatcagcgcaatttcctttttacatctggctccctgacgcgatggaagctccgacgcctgtcagcgcttatctccattcagctactatggtaaaagccggcatttatgtgattgcgagattcagccctattttcgccttttcagctcagtggttttggatcgtgtccctcgttggcctctttacgatggtttggggttcattccatgccgtgaaacaaactgatttaaaatcgattttggcgttttcaaccgtcagccagctcggcatgatcatctccatgctcggagtcagtgctgcggcccttcattacggacatacagaatattatacagttgccgctatggctgccattttccatttgatcaaccacgcaacctttaaaggaagcttgtttatggcagtcgggattatcgatcacgaaacaggcacacgggatatccggaagctaggcggcctgatggcgattatgccgattacatttaccatttccttaatcgggacattttcaatggccggcttaccgccgtttaacggatttttgagtaaagaaatgtttttcacaagcatgcttcgcgtgacacattttgacctgttcaccgtgcagacatggggcgttctgttccctcttttcgcctggatcggaagtgtatttacgtttatctacagcatgaaattgctgtttaaaacattcagaggaaattaccagcctgagcagcttgaaaaaccggctcacgaggcgcctgtcggcatgctcgtaccaccggtcattcttgtcgctttggctgtcagtctcttctttttcccgaatatattgtcgtacagcctgatagagcctgcgatgaactcaatctatccgacactgcttgccggccatgagaaattccacgttcacatttcacagtggcatggggttacaacggaattgctcatgactgcgggtattgttgtgatcggaacaattggttatttgtcgctgaataagtggaaaggaatctataaactgtttccttcgaaactcacactcaatcggttatacgataagcttttgactctgatggagaaaggctcttaccgggtcacaaaacaatatatgaccgggtttttaagagattatttgctgtatatcttcgctggtttcatcattctgataggcggagcttttgccattaaaggcggattttcatttaaaacggaaggcatggctaaaatcggtgtatacgaaatcattttgacgcttgtcatgatcagcgccacagtggcgactgtttttgctaggtcaagactgacggcgatcattgcactcggtgttgtcggttatacgcttgcattgttttttgtcattttcagagcgccggatttggcattgacccagctcgtcattgaaacgatttctgtggcactgtttctgctttgcttctaccatttgccgaaactgaggctgaaaacaaaaacgagaacgttccggatgacgaattttatcatttctttaggcgtcggtattattgttactctgcttggtatcgcatcctcaagccagcggacaaaagacagcattgcgtccttctttgtcaaacacagccacgatctcggcggaggggataatgtcgtcaatgtcattcttgttgatttcaggggatttgatacaatgtttgaaatcacggtattaacgatagccgctctcggcatttacagcatgattaaaacaaaagtaaaagaggaggggaaaagcggtgaatgaacaaaaaacaaatgacttgattcttcaaaccgcgacaaaacttgtatcctttatcattttgcttttctctttctatttatttttatcagggcataacgcgcccggaggaggctttgtcggcggactgatcacgtcctcttccatcgttctcttgctcttggcgtatgatttaaaaaccgtgcgttcccttttgccggtcaatttcatttatgtcgcgggagccggccttctgctcgctgtattaacaggcgttggctcctttgtcttcggagctccttttttaacccacacattcggatactttcagctgccgatccttgggaaaacggagctcgccacagcgacgatatttgatttaggcgtttatcttgttgtcgtaggcataacgatgaccattattcaaacgattggagaggaagaataatggaaatcttaatggctgtattagccggtattatttttatggctgctacgtatttgctgctgtctaaaagcctgcttcgcgtcattatcggaacagcactgttaagccatggcgttcatttaatgcttttgactatgggaggattaaagaaaggcgccgctccgattttgagcgagcatgccaaatcatttgtcgatccgcttccgcaagccctgattttgaccgcaattgtcatttcttttggcgttacatcattcatcctcgttatggcctttcgcgcttatcaggaattgaaatcggacgatatggatcaaatgaggggaaatgatcaacatgaataattttgttattttgccaatcctgatcccgcttttgtcggctattcttctgattttcatgacgaagaatcttatgctcatgagaatcttcagcacggcggcatcggccatcgggattgtgattagcggcatacttgtacagactgtcttcacaaaaggcatccagacactcagcttaggcggctggaaagcgccgtacggcattgtgcttgccgcagaccaattcgccagccttctcgttctcacaacagcgatcatcggtttattggttgggctttattccttccgttctgtcggtgaaaaacgggagcgctccttttactactccggcgttcagttcttgcttgccggcgtcagcggagcgtttttaacaggcgatttatttaatatgtacgtattttttgagcttctgcttattgcttcctatatgctgattgtattaggcggtacaaaaattcagctgcgggaatcccttaaatatattgtgtttaatatcgtatcgtctgccctgtttgtcataggggtcggctttttatacgctgtaaccggtacgttaaacatggcagatcttagcatgaaaatcagcgaaacaggacaaaccgggctgatcactgtgattggtgtcctgatgcttttggtatttggcatgaagggcggaatcttccccctctacttttggcttccaggctcttattacgcgccaccggcagcaatctccgcgttgttcggcgctttgctgacaaaagtcgggttatatgcgattgcgagggttttcacattgatttttattcacgatacagcctttacccatcagctgatgatttggctggcggcgctgactgtgatttttggtatcatcggttcactcgcttattcgaatgtcatgaaaattgtgatctataacattattaccgctgtcggcgtgattttgttcggtgtggcagtacacaccccagcatccattcagggcgcgatctactatctgattcacgatatgctgattaaaggcgctttgtttatgctggcgggtacgctgatcgcattgactggaactgcgagcctgcataaaatgggcgggctgatcaaacgctatcctgttcttggatggatgtttttcatttccgctatttctcttgcaggcattccgccactgagcggatttgtcggcaaatttaaaattgcggagggcggcttcgcagaaggtgaatttacgatatccatgctgattctgctttcgagtctgcttgtactgtactctgtgctgaggatctttatacatgcgttttggggcgaagaaaaagaaacgccaaaaccaaatcatcgaacagctaaaggacttctttatccggcagctatttttctcttgctgtctcttctcttcgggttgggtacagaatgggtgtcgccttacgttgatcaagcggccgagacgctgctgaatccggaaaaatatatcgaagctgttctgaaggagtagatcgcatggcttttcaaattttattaaatgtgtttctcgctttttgctggatgttcttaagcaacagtccaagcgccgcaggattcattacaggctatattctgggaatgctctctctctttttcttccggcgctttttcactcgccagttttatctatggaaattgatttctatcatcaagctctgtttcatttttataaaggaactgtaccttgccaatgtcagtgtgatgaaatcagtcttatctccaaaactgaatatcagaccgggtatttttgcttttaaaactgaactgacgaaggactgggaaatcaccctgctttctctgctcattacattaacgccgggaaccttggtgatggatatttcagatgacagaacaatactttatattcatgcaatggatatcgaggatgcggaaaaagcgatttttgacattcgggagtcatttgaaaaagccatacaggaggtgagccggtgatgtttacgctgatcctgcaaatcgcgctcggcattatggcagtgtctacctttttgtatgtcattcgtgtcattaaagggccgactgtgcctgaccgggtcgtggctctggatgcaatcggcatcaatctgatcgcaatcacggcgcttgtctccattttgctgaaaacaagtgcgtttttagatattattttgctgctggggattttatcgtttatcggaacgatcgcattttccaagttcctggagaaaggagagattatcgaaaatgatcgaaaccgctaaggtcgttgtggctgtattcattttgctgggtgctcttatatgcctcattgcttcatttggcgtacttcgccttcccgatgtgtttacacgcgctcatgctgcttctaaaggctcaacattgggtgtcaatatgattctgctcggtgtcttcttctatttgtggtttgtgacgggggagctctccgctaaaatcctgcttgggattctctttatctttattacgtcgcctatcggcgggcacttgatctgccgtgctgcgtataactccggcgtcaagcttgatgagagaagcgtacaggatgactataacggaatcagaaactttgtgattaaacgaaaagaggattcttatctataaaaataagcagccggacaggcagagttccggctgtttttttatttcttgatgacagccagcgtgcatctggatatacagatcagcctctcttgctcgtcatatatgtgaatgtgatagacaatcgtcgttctgccgatatgaacgggctcggctaccgcctttaccgttccttccttgacagattttaaatggttggcgttaatctccaaaccgacacaagcctgtgttgaatgatcaatcaggttctgtgcacctgcgctcgccgctgtttccgccagggccactgaagcgcccccatgcaaatatccgaacggctgcaccgtccgatgatccaccggcatgaccgcaacgcaacgttccgctgtgttttcaacaatctctataccaagcgcttcaagcaatgtgtgcttcgtatccatcatctacacccccaatatttaaagtacaccgtctgatttcgcaatcaaaaccgcttccgtccgggaaccgacattcagcttattaaaaatcgatgtcaagctgtattcaatggaccgcttgcttaaatgaagggcatctgcgatttcttggtttgtaaatcctttttcaacttcttgaagaatcaggcattctctaggtgtgagcacatcttgttctttttgagaggaaggagccggctttgttttttgctgagtcatcagctgtttaaagtaagcaaaatcgactaaaatttctccattgagtacgtggtatatgtattgggtgatcttttctttagattccgttttgctgatggcaccgtgcagacccgcacgaatcgcttcctcgaaataatcctcgacctcataaccggtatacacgataattttacaatgaggattctcttgtaaaatctgtttagaaagctccatcccattgacctcgccgcctagattcagatccattaaaatgagatcatatgacgagaaatcatgctgcttgataaactgttcgctcggttcaggactgagacaatcaacagacaaattcgaatccgtttccaaaattgtcttggtgccttccatgacagccggatggtcatcaatcactagtatctttttcatgttttcctcccttttactcactcttttccattttataaaaaagacttggcctgtgccaagtcgtttccgttataaatccattacaattcgatttcaatatcagccttaaagccctttccttcacttgtttcaatccgaaggcgcccatctaaagccctgactctctccttaatgccagaaagccccatgctcatggaatgctcagtatttttttcttgatcaaaccctacgccatcatcctcataatgaagaacgattttgttttgaatactgatgagcataatcagcacatccgtcgcctgagagtgcttgaccgcattagacagaaactcttgaatgatccggtacaaattcagctgcgaatccagatcaagggaagccgtaaatctcccggtatttaaacggatatgaaacggaacccgctcctgctgctgcgccaccagcttcgacagcgccttcaccaatccaagatcatacagaagctgcggccgcagctcatgacacgtctccctcgtcatcgaaatcacatcagacatctgctcattcatctgcacaagcttgtcctgcacctcttcacggcacggattatcatccttcttaaaatcacccaaaaacagctcacactggcgttttaaggaaattaaatcctgaagaaccgaatcgtggagatcgcgggcgagatccgagcgttgtttttcctcgatcgtgtacatgagttttttgagccatacggggttggattcttgttgttttatttcttctaaatgactcatcagttcttcgattttcatgacgttttcgatcgatacgtttgtataaaaagccaaagttttcagccaagaaagttcttcgagtgtgagacgaggcgtattcattttagataaacaaaggatcacaaatgatttaccaccgcgttcacctattttcatgacaaagcctttattaaattcaacgattttccctatttcggatgttacttttctaaattctttttgatagactttttcaaatgaatttacgttctcatcatcatatagtttaatatttccgtcagctgaaacttcatatacatgtgctcggctaacaagagaaacctcaagtatagtatttttcagttcttcaaatacttgagatagggaagtagagtctcttatcatctgcgtgaatttatatatactgtcttgataattgaatttttctgagaccctttttaatctaaatctgaaatcaagtacttctttataataaaagaccgccaacatgataatataaattaaaaaggttagtttaacactataaaaatcactatcaggactactaattaattcaattgtagagattagaataattgttggcgttagagctaaaaagccatagtaccttaatctgcttaaaataaaatctacattatagattttatttgtcatgaattgaaataccaatgagaatggtatcagcagcataaatgaagccgctaaaaaagaagaaacataatgtgcatttaaaaacacgtaaggtatcaaatataaacacagaaaaggcgaaaaagaaaagatattaatgatagtgagaaccttaataatatgtgcttgttcagtgtctttatttttaattagtatgatactaaaataaacccctactataataaataaaaagaaaaaagcaagtaaatttaatttaggaacataatctcgaaagaaaagatgtgaacgaaaaatttcacaaactacatttatgaccggaatcaaatataaaataaaaactttcttattaaataatttggttcctaattctttgaaatattgataaagaaagagaagatagtttagcggaacagatattaatgttaccaccattataagcctgctcagcatatctcccttagcagaccctccagcacttataaatgcaatagaggcagacaacagaaagataattaaaactacagctgagagaaggttctttgattcatttatttttaatataaaaaagcaacaaaataaacaaacaatataaaatattaacggtattaagtaagtagtgaaatttttatcattaaataaggtcattttcaactcaagattatgtccatttctttccacaatcatcgaacttacattttttagtttgttcatttttatttcgtttgtgtttatctttttattattaatactctttacgatatctcctttttctataccgctgtatgaagccattgaaaattcatctacattggtaattacaatatcgccattttttcctttagagacagttgcccctactaataaattattattactaatataagtcaaataaataacataaatcaaacttaatacaactaacactacagaaattttgttatttctagacttcatttaaacctcagtacttccaatctagcattgaataaatttctaatcctttaaaaccatttattatgcattcagattgatcattatcaacacccaataaacaagcatttccttccattacttcccttaaaacatttgggtatttaattaagtatcctaccatttcttgcataataaatcccctccttatttaatcataacagacaataatttttcagttttatcttctcctagttttaattgtgacatttcattttttattttttggagagataaatgtttcatcaccagtaaatattgtataacgcctgcttctgtcaattttcgcttcaaagccttagtattaattgaaacaaattcctctggtttttgatataaacttagtagctccgctgaagcatcgttaaattgtttctttaagtataagtatgccaatgtattttttttctgaacaaaatcgttatttaagtaaaacaaacctttataatcattatcgatctgtgaaataatcccaagttcataagaataagaagccacgatgggatgatatttgcctgttgccaacattactcccattacacaaggcaatgccgttagcgctcctgatttatttttgatcatttcaagacaggcttcttcagtttgcggcgcattcacaatatcatcatgctggccttgaattgattgtaacgcaaaattcaatatctcttgtgaaaattctggttcatgactagcttgacacatcacttgtatacttagggtgtaaagagctgtaactgcatttaaagcgattgacgagtcaatcttcatccagacagcacttccattatcttgatcctctaagtcatcataaatatcgaatgagagtataagcaattcaattccggcagctagccattcgattgctttttggtcctgaccgttaaaagctaaataatgatgaagagccaaatcggcaaactcaaacgtatccttagactcaataaaattctgaagatatcgttccaagtcctgattcattattttttggcttacaatctccttcattttctccttgatccggacagaatctaaacatatctgctcaataacgacttcccccctcccattccattttactaaatgggacatttaaaggacagcaggtttttcgttttttaacaatcatataatactttatccatttattgtatcggtagaacgaaaaaaaagacttgtttccaagtctttttcacgaaattttcattgcataattgtatttatcgagttgatcaatgcttttgttaatgtttcgtaatgaatctgtcgtttctttaatatcaagttcgagtcggaataacaattgttttacttcttcaagtttcttttccatcgtttccacactcctttttttgaaagatcaatgaattgtgtatggtgaacgagtcctaggtatttgatctgttactaatagtgtatctgctttcggctcatttttcaccgaaaagtatgcaaaaaagtcctgcgtgacaccgcaaatctcaataggtccttatactcaaaggaatcacaacaagaacgggactatctttctatgcgaaagagcgtttatatgtgctgaaattgagaaagattcttaatctccttgattttaacgggtttcgcattttcattaagcaagactatagtccttcataccgtattttcaaaattgaatatgcgattcttggcgtttcctgaccgacaaacaccgaaaaagaccgcaacgctaaagttgtggccttttcgctttgtcatattcggcaattagggatctatacatatagaaacatccttttttgcgaggtgctcccatgagatatcgttatccctggttttacgtgtatccgtatgaggtacgccgtccgcccgctcctgccaacaatattgatacctttatccgttcagcgaggcaggccgcagggatatttgcggatgcccagctcgttctcggccgcattgcgggctcgcgggagctctcgcgccgcattctgacggcagccgagcagtccgataaacaaaccatcaagcgcctgatcaaacaattgggcgtccggcatgaagtggatacggtctttaatcccgacggcatctatatcagtcttatcggaacgcaaagccgaatgattcttgctttgcggtggtcagaggaccgcaatcattttgcgtccataagattatgacaccattccagagcctcaagataacattcatacgcttcttctttgtcgagttgattgcctaattccgagcaagtgtcccagttgttgctttcaattaatttcacaagctcaagcatttggtagtagtcgttttgatggcctaataatgcttgcccgacttcatcttttaaaggcaattcttgaacaatttcctctatttctctatgcaggagggtgtctatgagagaaaacattccgatcagcatataagaagcaggctgcggccgggatgtctttctcgccagcagttcgcaaagctttgctcttatcaaagaaatcttaatgatttcgtgcttgctggaatgccctttcctgcttaaatccttaaaggaaagaatatagatccaccgtttgatttcattaaatcccagcagcataatggcctgttgaatgctttcaattttctggctcaaacggctgtgggatgagtttaaaaattttaaaatttgataggacagtgataaatcccgctctatgtactctgtcacacgctttatgttaggctgctctttactcagttcgttaagcagttcatagtaagaatagaaatgagtcgataggtcatgcccgctgatgatgcgcggctcgctgaaaaagtagccttggaataattgaaagccgtcttggaccgcctgtttatattcttttcgggtctctactttttccgctaaaaaaatcaggccgcggcagccgtaggtttgcaaaattgttctgcgttccattcgtgttgttttgagaaaatcaattttcaatatatcaatatagctcatgagtttttccagtaagtcctcatcttgcgggtttattgcataaaaatcatcaagcgccagcatataccccatttttttcaattctttgcatctagaaatgagggccggcgtgatcggtatatcttcaaggatttcaatgacaagctgtttcggattgaaggaggtaggaagattcgaaaacatcaggctttccgtaaaattaacaaaacagcgtttcccttccgtcagcttctcaattccgatgtttaaaaagctgttgatcaccaaatctgttgttgcctgatcgccgtctttagcgctatacacgttctcttcgctttctctatacagcagttcataagcaacaacctgttcttttctattaaaaataggctgtcttgcaacaaacaccctcattgatttatcccccttacaatacgcgcggctttcacccctaagtatatcaaataatttgacgaaaattgtctaaacatgaaaaataatatatacataaagaaaactggcccttcgtgaacgaaaggccagtttttctttattcttcctcaagctcttcttcaattctgcttttcacttcgtggatccgctgcattttattgctccagcagtcctcgcttaaatcaaccgggtattcctccggcttgctgattctcttatattcctcccaaagcaggctgaggttatcctgcacatactgctgtatgtctgaaatctcagggttttggtagcaaagaatacccttctcaaaaatcagctcatgaagatccttcgcataaaaattcgtgacaaatttgctgatgaatgtatgaaccgggtggaacattctgagccgcttctgatcattcacctgctcatcataaagcgcaatatagtcgccttcagaatgatggttggactgattaataatgcggtagactttctttctgcccggtgtcgtcactttttcaggattggacgaaattttgatcgtgtcaaccattttcccgtcttcttcaatggcaacgagtttataaactgcgccgagagccggctggtcataggcagtgatcagcttcgtaccgacaccccagacatcaatgcgcgctccctgagcctttaaattcataatggtgtgctcatccaaatcgcttgaagcaatcaccttcgcatctgtaaatcctgcttcatcaagcattttccgggctttttttgacaggtacgccaaatcgccgctgtccagacggatgccaatgaaattaatgcggtcgccgaattccttggcaaccctaatcgcgttcggcatgcctgaacgaagcgtgtcatacgtgtcaactaagaaaacgcaatccttatgtgtttccgcgtattttttgaaagctgtatattcatcgcggtaagcctgcacaagcgcatgcgcatgtgtgccggaaaccgggatattaaagcgctttccggctcttacattgcttgtcgcgctaaagccgccgattaaggctgctctcgctccccacatggccgcatccatttcgtgcgcccgtcttgttccgaattcaagtgcaacttcatcaccaatgacgcctttaatccgggcagcctttgttgcgattaatgtttgatagttcacaatgttgagcaaagctgtttcaatcagctgcgcttctaccaggggtgcctccaccctcataatcggctcattgttaaaaacgagctctccttctttcatggagtaaagtgaacctgtaaaagataagccgcgcaaatattcaataaaatcttcatgatacccgagttcatcctgtaaataactcaaatcgctatccgtaaacttgaaattttccaagtattcaatggctttttccaagcccgcaaatacggcatagccattttcaaacggaagccttctgaaaaacagctcaaaaatcgctttcttttcatgaatgccgtctctccagtacgtttccgccatattgatctgataaaggtctgtatgtaatgacaggctgtcatctttaaatccgtactctaacactgtttttccccttccttactctgccacttgcgctccgatgctgtttgcaaaatgggaaagagcccatgcgtgcccctcctgattaaagctggcaacagcttgtttatgcacaacaatcccaaaacctttgttgtatgcgtcaacagctgtatgcaacacacaaatatctgtgcagacaccggcaaggtgcagttcgccaatctgccgctctctgagtttgagctctaaatcagttcccgcaaaagcagaatatctcgttttttccatgtagtaaacattaggctcatgttcatgtttctgatatagaggcaaaagctttccgtacagatcttttccttccgtgccttttatattatgcggaggaaaaagacgggtttcagggtgatattgatccccttcatcatgagaatctactgctaatacgacgtaatcaccgtttgtgatgaattcttcagttaaattgacgatcgcctcttcaatcattctgccgggctccccgcaggtcaattttccgtcactcgccacaaaatcattcgtataatcaatacaaataagtgcttttttcatagccggcctccccgccatcagtatgagaacattatatcttatctccagttgtaagtgaattgccatgaacaaaaagacaaacggtccgtttgtctcttaagatttcagcactgaccgattataaatgtcgtcctgaatatatatcaattcacgattcacagcgatgtcagccgcaatgacgatgcctaaaggcgtatgaaactgaagatcagatacaatcttgaagggcactccgtaccggttcgccatttggatataaggagagtaagactgatactgaagctctccattaatcaaaagggtgacgttatggctgtttttcagctcgtgctccgcctctttatacggtttgcttctaagcacctgtccttttgtcagtgccaaaacgactctttctcttagagaacctaaaaacaagtggcgctcgtcaggctttgtctccaaaggcccatacattccttgctgcaaatagagatccattttatcttcactcaaaagcctgtcctcccgtcttgtttgtcttcattatcacctgatcaggcaggagctaaactttcaagcgccgtttacatttctgttacccaatgaatgatttttttggccagctcaccagcagggatttcctctgtatgccggcgcaacgacgcttccagccgttcaggcagagttgctttatcttcttcataggaaatgatcgtgctccactccagctgcggtaccgctacaagcgtgcgcagttcttttctgttttcatgcagatacacgtccgtgatcattccggtttgcgtattgatatttgcttttctgattttcataacatgacctctctattcaaagactacccatattatacaataaaaaagcaacagcctcttgtgaaaaggctgttacccgttaaacgaaactgtttcatcagtgatatcggcatctttgaagagagttttactcgtttggttgttaatcttcacaaaatcaccaagctgaaatgtgcctgaccccgcccctgaatgagcgacgcttttgggcgaaatcgcaaatacgtctccaaagcttgccgcggcattatccgtaactgacatgatataaatcggccccacaattgcaggcatttccccacctccgcattgatttacagcatcatatgcaaagagccgataatggtgccctcctattcagctggctttgctttttcttcgagtcgtgaccgctggcgcagcttgatcaaacggacaatattcaggaagaacgccttcactaccgcataaaccggcaccgctaaaatcatgccgagaattccgccgaagcttcccgctccgattaatagcaaaataatcgtaagcggatgggtattcagccgctttccgatcacaagaggagacagcaggtttccgtccagctgctgaacgatgacgaccacaataatcgcaaacagcgctttggccggcgagtccataaaaccgacaatgacagccggcgcggcaccgagaaaaggcccgacatagggaatgatattggtaatcgccatgacaatcccaagaatcagggcatacggcagtccggcaattaaatagccgataaaacacgctgttccgacaaaaagacagattaacagctgcccctggaaatatgccgcaagcgtatcggataaatctttaaaaatctttaagccttctgtccgataagaagccggtagaatttttactgccaaatgcggaaagcggtgtccgtctttcagcatgtaaaaaaggataaatggaacagtaataataacaagcgtgatgtttgtcacgacaccaaacaccgcagataaactggacgtgatattttgcggcaggttttggagaaaacttgtcaatgactgttcaatttttgatatcgatacataatcctggttcatcatccaggtaaaccattgagaatgggacaaatcctttgtcagcgcctgaatctgttttatataatcaggaaggttgttaaacagccctgtcacctgtgaggtgatgataggtccgactgacgctgaaataaaggcaagcaaaccgataaacagtaaatagatcaataggatggataatgtccgcggaatttttttctcaagcaggcggacgaccggattaaatatgaaatacaaaattcccgcaattagcatcgggaaaaacaatgtcgagataaaaacaataaacggctgaaatacaaatgaaacttttgttgctacataaataatcagcaaaacaaataaaatctgcaatgtccaaaaatggacttttgatttcaacaagctttgttcctcctagtttttctttgtctgtcagataaaagaacttataccccatcattgtaacaaaaatgaacccatatcagaactcttaatataatgaaaggagtgttggtgatgaaggccgtgacatacgatacagattcagaactggcttatatctatgttcttcctccgaaaaggaacaggaatatacggtctgaggagcttaaagtcaatgattgtatcctgctggatatcgaccaagacggcaaaattgccggattcgaatgttttggtgaggcagcacacctctgtgccccatttgccgggaaatcccggctatatgtaaaagattcagacggttatcattttcgggtctgccagcatgcttcagtccgttcctgctatacagtgtacggcgtcactttctgtttttcagatggtgactatcaggaatttgccggttttgaccttgacggaacaatgtatcatagtgcgtttttacagcgcttaactgaaaaataggacgtcccggtgtacgcctatttttcatgcgcaagcactgttagacccgctcactgtaatctggggtgacggaaatcatgtgctggattctgatcaaacaaacagaatttcgggctccttcaattgtgatatggtcaggtttaacatcgatcagtctgcctctgaccgtatctcgtactgtctgtataacgaaccttgagccgatgagctttttaatggtctgatagacataaggatcgactaaagagaccagttgcggactaccttggttgaccatatttttatcccctttgtgtgttttatctcagcttatgccgcgcttatggataatgacacaggcttacctgataaaacaaaggggtgcggagattttaggagaatacgtttggaagcggtgtaaaggaagtatcgatgaagcggagacagcgaagaaagctggcgctgttccgtacttatacaggctttatcacggatgcctgggcttggtcgattaattggtccagcttttctattttttttcgtgcggttgaaggatcaatttggcggtaatgatgatggccgcccggctcttcatccagttcgtccgcttttttgacaatctgctgcagtgtgtttttatctaattcgccttcaggcaaataggaatctgtatgaagcaaaatggctagtgcaatctcttttgctgctttcggttcctcgccaagccgaatcagaagtttatgcgcccgttccgcccctttaatggcatgaatgtcatttcttttgtatttctcataatcccactttccgtctgtataccattcataatggccaatgtcatgaagcagtgccgcttttgctgctaaatcaggattaatgtcagccttcacagacagcctgtatgcatgataagcgcaggcaatcgcatgtgccacgccggaacgctgaagatatttttgtgcaattggatgggtgaaaacatccattaatgtaacctttctcatggaaacccctcctttagatatttttagaatcctaacataatttgcagagaaactcaattcttatgtcacatcattttgatcttcttatcatcattgttataccctaaaagcaacgtttcagtcagtatatgcggctgttcaataaaatgcgctggctgtagccttttgtataaaaaaaagagcagaaaatatctgctctacaaaaactctttaatatcataaatgcggccgttttccgtccctttttctagtaaagaaagcagcgtgccggcaataaagtccggactgcgaaggcttcctgtttcatttaatttccggaatcgttcaatgtggtggaaatcctttttcgatgaagaacggatgacggcctgcatctcagtgtccatcactccaggtgagaacgaaatcatgttcactggcagctcttcatcctcctgttcaaatccgaatgtcctcgtaaacatgtcgagcccggcttttgaactgcaatacgcgctccatcccttatatggatttttggcggctcctgaagtaatgttgacaatcgtctttttgccgctgtatgaagcaaaccgttttgtaaacagctgactcaaaagcacgggcgcagtcaggttcagctgataatggcgctgaagctcgtcaagagacgcttcgccggcacgtttgatcggcgttaccattccggcgttattaataagggtaataccagaataacgatctgaatcgatggatgagagcaatgtttcaaattgctgttcagcttcttcgagattgatgaggtctatttgatgctgcgttagtttttcatgagagacatccgttttcgttctggataaggcatggacttcatgccccttttctaaagcctgtaatgcaatggcttgacccagcccttttgacgctccggtgatgatataaagttccattggaaacctccttttccgttattattgtacggcaccgcttttacacaacacaagcacgcggcctacgctttcttgttttcctgcgctgtgacttttgggatgaggaacacgatgcctgcaattccgagcaggatcagtacgacatagatcatcggcagcagcaatgatgatgtttcttgttcatcttctgtttccgttgatgatgtctttgttattggtttatctgcaaatgtaattccaagctgtttcgactgggccgcaatcgtgttggaatcctcggcatttgttgatgtaaacaaatcttttatcagctcggcgtccttgtccttcggtttatcaaaagtgatatccttttgttcctcaggcagttctgttttttcttcatagtaggtatcttcatgcaaataattcgtatcgatttcgatgtcttttttctcatactggtttggcgcgacatctgtattttcttcagtttgggcagcagctgcagagggtatgaaaagggaaaaagagagcatacaaatcatgatccccttttccatgctgcgattacgcttcatacgtttcatcgctttctgctgtgtgttcagccatcagccggataatcagcggcagagccgcggcaatcaccgtaatgatcagcagaactgttattcccattgtaaacaagtgcccagtaccgtactggatgtcgatatatactttcgaaaccggatcttcaaatgtaaagttcggcatgatcaaatcaataagcggtgcgacatagaataggatcattgctgctgaagcaacccagccagggattgatccgaatctgaatgccgtccggatgaaggcagagcttgcgaccagcaatagaatcgtaaacaccgaccacttaatcgtctgatcgtccggcagtgaataaatattcaagccgaacaagctgatcataagtccgacaaggatattcagaattccgaataacgctcctttgacgagaagcggtgcgttttggtaatacgagctgaaatagccgattaacagactgctgatcaacacaatgacaaggatgacaaccggaggtaccgtctgaattttttcttccggaacctctccgctgattttaagcggattcgctaagtaatcatatacatagccattgttttgcccgtctactaatgtatttccgagtatgccgtatacgtcatttcgcacgagtttcgtggaggcgacatttttcccccagttgttgtttaaggtgtcggctttcgcttgaacatcattgacgctttgctgcatgttggttgtgtaatcaatgatgccggactggcgatcagacaatgaacccatcatgtctgacatttgcagcacttcctggccgaccgtatcttggacactcagtgccatggtgccagacagcccatcgttgctgaacgtcgcagattcctgtgttgcgcccgttacaagctgttctgacgcttttgcggcactttcagagattttcgtcagttcgtcgagaacacctgcttgagagtcacggatatagccgctgtagtcgtccgcaaatttggtcatgccgtcgatgaagctgttaatatcctcatctgtttgcatcgtgttgtttttgagagcttcccagctggctgattcttcaggtgtgagagccaggactgatttgacgttgccctgctggccgtcaatagcgccggcttttgcagcactgtcaatcgtaccggataatacagagtcataaacagacaaatatttatagtatctcattaaagcggagatgctttctgtattgatttctcctgaaaattgaagctgatctttattttcaagctcgcgaatcgcactgtaaatcccttcaaactcccgcttccgtttcgcttcgagattttcaagtttaccttcgagctttttcactttgtctttcaggtcatcaatttcatcagtgagaccattcatttgctctgttagttcctctaacttctttttcaactcttcattatgagcagtttctttttccttcagttcttcttcaatttgcttgattcgctcagacgctttgctgagctgttcttttgctttggcgatatcagaaatgtcatcgtttcctggttgctcttggtccccaggctccgtcgtatcttcgccgctaccggtatctcctgaatctccggttccgccttcatttgccagcttgataaattgaagggctgaatcagaagatgcagtctgttcggcagatgtgcccgtttcagtttttccgctgtcggacgcaccatcagaggcatcgccgttctgctcctgaccgtctgttcccttctgctggtcttgatcctgagtactgccgtccgtttgtccgtcattaccggtatcactgctgttattgtcgttccctgtgtcgccctgtgtatcatcgggctttgtactgcccccgtcatcaggtttttctggattatcagtggacggatcgtctggttcagtacccgggtcctccggtgttgggtcctctttttcaggctccttcagattgtctgaaatatcctgaatatcagcagcgatatttttcagttcttcacgctgtttttcaagatcaattttgagttcttcaggatcttcttctttagggtctttatctttatcattgttgtcagaaccatcgtctatgactgggtcgtcccctttcgcaactgtcaatgcctgacgtgccgggacaagcaattcatacacctgatttagtgcagcctgtcttgatgcggcctgatattgttcgattaaattactttggatttttgccatgccaagttcctgctgtgacacttgcccttccctaatttgctgggcgtttgccagcacattactggtttgtccgagctgtgacttcgcttggccgatcccagttgccaatccgctcatgcgttcgctgaactgattcgccttttgctgtgcctggatggcatccagacctgtccggatttgctgctgtgttgaatcctgggctgccaaaagcagctttttctgattttcttgatattccttgtatctttcaactgtatcaatgaattctttcagcgtatttttggcttcctccgctgtagaagctttttcttttgtcgtgccttgcgcttcattcattgatttcttcagctcatcgattaaatctttttgctgtttgatttcacctgctaaatcattagagcttggtttgtaaaagttgtacatgacattctggaattcagattctttattgacgattttgtcaaattctcctctgatgttgtccactttttgcgacacaaagttccagtataaggctgacatttttttgttcattgtcttttgggcatcctcaagctcacgctgaactttttctttgttgaccgcattcaggttatcttgaatgctgaattcaagcgttgctttttgtggatggtctttgtcatagctcaaaatgttttttgagaagtctgagggaatgtagacgatcgcatcgtatttttttgacgcgagaccggtctcagccgcgctacggtttacgaccgtccacgaataatcaggacgttcacccagaacagccgctacttccttgccgaactgggcggatttgtcctcttcatcagactttacctcatcactcaatacgccagtgtcttcattcaccaccgcgatttgccgggtggaattgactgcttttttcgtcgggtcgtctccgataaatcggaaaaacaacaccggcagcagcaaaatgatgatgacggcggatattaacttgatcaagctttttcgttgttctgtcatctagcactctccctttcagcagaacataaaggaatttgaactttttgctccttcccgttttccacaacatatccgaagcccggctgaatctcaggctcctgtctttggtacgggagaggaatgacattttgctcagactttttcatcagcagaatcgcgtggcggatttgcttcatctcagtcgtcaaggagtcatagccttttgagaattcgctgtggtttccgcccgggataaagctgaacccaagatgagcgtatgatttcatgaagttagcgagacgatcttgtattctcgtatcaatcgtctgctggaatctcgttatcccgtcaatcatcagcaccacttgtgagaatcgaagattttgcgcgtctccttggcggacggcttctacatacatggcttctcttgttttgaaaatgtcttctgctgtttcaatccactgctcaatatcttctttcgtttccaaatatgaaacatctgattccttcgcataatgagataagccgcggtcaatcgagtcaaacaggccgatcatttcggtttcatcatcaatcagatgttcgagcatgacttttaggacgtttgttttcccgcgctgagtctggcctaaaatcaggcagtgcttatgcttgcccaaatcaaaatagactgggctgactgtttcttcatgaagcccgatcggtacagataaaggcttgcgttccagcttgaagcggagagaaaattctctcgttgtcaggctctcaggcagcatcggaatcggtgccggctgctccaatgaagcaaatcgtccttgaagtttctgtacgtctgatttcagctcgttgaacatgccgatatcatcatcggcgtcaacaggcaggaacatttgcgcgaaataaagctcttccttttgaatgatgacgcgtcccggaatcggctcaagattgaatttcggacggccgtaaatggaatatccttctgattgatccatgagataatggacaacctttgttttcaagttatttaacaatgactggcggacagcattcacccgcgttgctgtcagcataaagtagatacccaagctttgtccgtctctggaaagctggacaaattccgattcaagctcatgcatctcatccttgactatgtcaaagttgtcaatggtgataaaaatgaatggaagctcttcttcgctcagcgcattgtacattttgatgtggctgatttctttttcccggaacaaacgtttacggcggtcaatttcttctttgatgcgaatcatgaacttttcaattttccttgactggtccatcaggaagtaatccgcggtatgcgggagcttcgctaatggcagcagcgttccgtttccgaaatcaaagatatagacatgaagctcttcaggtgtgtatacgtccgcaaaactcatcaggaacgttgcggctgcaatcgattttccgtagcccgaagagccgaagatgccgatatttccatcttccatcatcttataagcaattggcgcctgtctttgcagatcaggttcatctacatacgcaaagtggaaatggtctttttcgtttgaagggaaaagagtgcgcggaatacgttccgcaagcggcggcagccaagggcttggcagcttctcaattcccatttcatcttggatgcgttcaatttcgtcaactacagcttcgatttcggtttgaacgtcttttttcgcgatatcttcggtatcaacctcagaaagcgggatcagacccgtatctgtaacgatcgcgatttcatcctcggtaccgtagacttcctctaagtaaggcgccccgctccatgcagattggaaaagctcatacacttcattgtttccgacctgcaaatagccgcggcctgttacggtaatgtttgcggcatcgctgtttttcaaaatttctttactgtcggtggcatcctggaccttgagcgctactttaaagcgcgagttactccagatctggtcgtcgatgatgccgcctggcttctgtgtcgccaaaatcaaatgaactccgaggcttcgtccgatacgcgcggcactgacaagctccctgataaaatcaggctcctcgcttttcagctcggcaaactcatcagaaattaagaacaagtgaggcatcgccacttctgctttcccttgcttgtatagctttgtatagtcattgatgtgattgacttgatactggtcaaacaggcgctgcctttttttcagctcgcttttaatggaagcaagcgcacgcatactgaagtttttgcttccttcaatatttgtgatcgtgccgaggaggtggggaatgttgcggaacggctgcgccattcctccgcctttatagtcaattagtaagaaagccgcttcatgcggatgaaaatgcactgcaagtgacaagatgtaggtctggagaaattcacttttccctgatcccgttgtccccgcaagcaagccgtgcggaccgtgtgctttttcgtgaaggttcagatacacaatgtcatctttccctttatagccgatcggcactgacagcgacttcgacgattcacttgtcagccatctttgctgaatgccgatttcttttacttccttcgcatgaaaaagctccaggaacgataccgtttccggaatggaattcgtaatgccgacctggtggttcagcgtccgcagcgtgcgtgagaaccgttcgttgtcctcacgctgatgatgatcgagacggaacggaattcttaccgcttttttcttttgtattaaaatgtcgccttcatgctcattaatgtagcggacaagagttgtaatgttttccgacaagctttcctttgtttccgccgcgacaattgtcgagatgcccagatgctcatgctgtccttctaaatattcgagaatgacatgctcagagatcagctgctgattcgtgatgacaaatacaaaatgcggtttgaactgcagtttttctttgtcatcttcgagatcacgctctctgatcaattcgtaaagtgaagacaagagctgatctcgggtttgctcattataaataaatccttttgcataaatatggggcatttgaaattgcggaagccacttcatccactcccagtctttatactcttcttcatgaaaaataaatacaaaacgcaaatcgtgatagctgttaaagaacgacagctgtccgattagctggtgaatctcatttttcacaatttgcgatttaccgacaagccccatcggaccttctgccaaatcgaccgtcaccggcgcattgcggatatctttatagacgcgctgcatgtgctgcgatttctccatgaggtcatcgatatcacgattcgccaagtctccgccgctcatattgatttcatagcttgacggaactgttcccgtcccaagccgcagctggagataatccttgctttcaagtgatttttcccagatccggtcactgatttcacttgttaagtatttcatttgttcaaatgaaggaaagtgaaattcaagaacctgcttttgcttttcagcaagtgcctgaagctctttccgcttattgtctaagtaaagcttatatacacgctcccgtttttcctcgcgttttttccgctggtttttatcccggaaatattgcactgtcgaggtaatgagagtcatcataaacatcgccaaagaaacgagtataaatatgccgcgcggctggatgatggcaactacgcccatcacgatcagcatcacaagcggaggcaggatgacgagccacagccctctgttggtttgatcgctctcctgagagggaaaactgaaagaaacgcggtcatccggcagatcgtataccatccgcggcgttcttctgtactgcggatattttttctgcatttctgtactcggtttgaccgtttctgttaacgctgtttcaaactgggcataatgaacaatttctaaaaggtcttgttccgtcaccctcatttgcgtgaagttccagaatatctcatcccccggcttgagcggcgtattggcgttgattttctctccgttcaagaagatcgttccgctttcaggtcggaccgaccagctgccgcctgcacgaagcaaagaaaacgtgctttgttctgcaaatgcaaagtcttgcggattcagataaatatctgcattcgttttttctgaggaacatacaatttcatcccggtttcccgtaaaataaacggatttctcaggttcactgcccgtcaatatcaagcgtatatcctgctgatccgtttggagagtaaatgatatatccgcctcaatcgtgccgagacaatcatttcccaggaaaacttcgtattggccgccggattcctttcttttaagagaaatcactccgctattaaatggaatggagctgatcgtaacagaatccttcacatcaggccctatggtcaccggatgagacgacgggaggttagacagatttaatttttgaacgttattttggtaaaaaacccataatagactcaaatggcgaacccccttacggccgaatggcagcatgcgatgacctgcgcttcatgtctcacgttatttgtcatcttttttctcatctttcttttctgtttcttttttctcgtcttcttttttcttctgttcttcttttttcgctttttcctcggctgcggctttttcttctgccgctttctcttctgcttgtttttcttcgtctgtttgtgtctgttcttcgcttgtatcgactaacgatgtttcagaattagactgtttattttcttgacgttctttttgcgctttttcaagctcactatttactgagtcaagttctttttgtatgtcttcatcatttgtatcctcagataaaagctgctgtttatatttagctagggcaaagtaaatataatcattgtattcaagcttacggccgatactgatcgcttctttgtattctcctcgaccataatcaatccaatataagaaatgctgagggtctgattgaagggtgactaaattattttctatatttttggtttttgcactccccaggttttcgacctcaacataggacgtcgccagctgatactgcaccgattcaggcaggctttccgcatcgtacttggacagtgtgctgatgacttcactgtactgcttgtttaagaacgcacggttgctgtccactatcgcttggtgctttggctgcgcgaaaaataaggcgtacatcgaataaataagtgccggtacaagcaaaacaatgagccccaagccgatatatcgctggatgttccacttctttctcgggatatgtatgtatgtttttgctttggcttcgagctcatcaatatgggtttgaatcagctcgagcaaatcatcataggattcagcatctaatatcgcctttgcctctgcggagaacgtcagcgtttcattgaatttcaggtagtcttcaaacgcaaaagcgccgtcaactgccaaagccgctgccgctttcagctcctgccatactctttcctcatcacgctcgtaaggaggaatgctttcttttactccataatggagaaaataaggcgtaagccctttatcgaatacaatgttttcaggagcgacaatcaaattcagcctcgacagattgtgctgctgtacggcttgaacaagctgataggcaaactgccatttactttttttatccttagctttcatgaagcggaatgctttataggaggagggaggttggattgtgatgattacttcatcatccgtcacatcgatttctttatgaaaaaatggatttatatctttgatcacgttagcttcaagaccgtcgagaagctttattttttcccgttgaaaggtaaatgtatagccggcatctgttttctcggcaacagcttctaattggttttctaaatatgatttttgttcacctgacattcaaccagatcctttcataatatttcaagccggtctccgtttgtaatgccgcaatcagacagcttgcattctccggaaaacaccttatccttgttcaccactctgatccagtgcccttcgcgcggaggcatagatacgctttgggcctgccaagcaatatcaattacttttttcaccgggtggtaatctgacaatctgagatcaaagacactgccgttataatgtttcaaatctattgtaatatcaatatacatttaggatcacccttacatagaaagagcgccgtcttcttttgaatcaggcgctccttccctttcatactgttatccgcggatttgatttgcgatgtcttggtcagtagactcaagtgtatttgctgtttgatcaagctgctgattcacatcttgaagcaaatctgacattttgataaatgaaggtttgagctgctcgtattgatctgcgaacgcttcgcttgaagcaccttcccacatgcttttcaaatcagagatcattcggtttaaacgatcaacctgatttaatacttcttggctttcaacgccgtattgcttcgccatcgctcttagctcttcgggtgtgacacgaattaatcctgccatattcctcattacctcctgtgccatcagcctaaatatgggctaattcacttatttttagaacgtcattattataaaaacagtttttcggcatagtcaaacaaatatgttttaattttacaaaatgagtccaatggtttaccccgaatcacttaaaaatgacatatactgtaaagtaaataggtttattttcttaatcttctcttcattctccgaataatccaaaagacccaaataactccccaactcccaaaaaaaacctttcagaaaatttgatgctacagcaccatttctgaaaggttcaattttttctttccttaattagtctcgcctccgatgactttcttagaagattaataggataagctgtcgtattatatgaggcatacaactgtcctgcaaaaaggcgattacaccgccaaatgtatatagaacgtttctctcatgaaattgtttttttgcttctgttctttgttgttgattttcacaaacaacaacaatcataataaaaggaaggggatgagatgtcaaagagaaatcaagcacgaaaagtagggagatttatgaccatgccgaatgatccgtttaaatatagttttgacagacttgaagatgtggctgatcatatcagcgacgttctgcggtgcccgatcaccatagaggatgttaaccacaagctgcttgcctacagtacacacagcgactgcacagaccctgcccggacgtctaccattattggcagaagggtaccggagaaggtgattaacaagctgtggaaagacgggacaattcctgctctcttaaaaacggaccagccgatcagagtcaagcaaatcgatgaagtcgggctgagcaatcgcgtcgctatttcgatttggaaaaacaagcaagtacttggcttcatatgggcgcttgagatccaaaaaacattgtccgatgaagatctgctgacattgcaaatggcagcaaaagcagtgaaaaacaagcttctcaaacttcaaatcagaaaaacgaaaaatgaagaacgcagccaagaatttttctggaaaatgctgaccggacacatccatcaggaggatgatatggcggatgggttccataagcttggaatggccgctccttcagagttttccgttatgatcatccgcataaatggcgagctgactgaaaaaatcgaacagcagctgcaatatttacaggaaacgacccagcaggtttacgtgctgctggcgaccgtagattccaatgaacttattatattaacctcacccaaaacagatcatccttttcaagatttaaaacagtttgctttaagtacgcaaaaacagctgaaggagcggtataaaatagaagacgtttctatcgcttttggcggaatatacaactctatttcttttgtctcccgctcctatcaggaagcattgtccgtcttaaaaacgaaggaacggttcgctgaagagaccaaacattttttcagcttttctgagttaggcatttatcaatacttagatgtcttaaatgaaaaacggaaacaggcgggccattataattactcgctttccaaactggaacaatatgaccgggatcaccagtcaaatatggtagagacgctagagcgctttattgaagcagacagcaacgtgaataccgcttctaagctgttaaatatacacgttaatacgttgaattaccgactcaagcggatcagccagatcgctgaaattgatttgaaaaatgtgaatcaaaaattcaccatctatttagatatcaaacttcggcacatggatttgtgaaatttcacaaatccatgtttttttattttcttaatcaaacaaagaattttccaaaatatcaagctacactaaaaatatcacagatacaggaggagacagatatgatcataggggttcctaaagagataaaaaacaatgaaaaccgtgtcgcattaacacccgggggcgtttctcagctcatttcaaacggtcaccgggtgctggttgaaacaggcgcgggccttggaagcggatttgaaaatgaagcctatgagtcagcaggagcggaaatcattgctgatccgaaacaggtctgggacgccgaaatggtcatgaaggtaaaagaaccgctgccggaagaatatgtttatttccgcaaaggacttgtgctgtttacgtaccttcatttagcagctgagcctgagcttgcacaggccttgaaggataaaggagtaactgccatcgcatatgaaacggtcagtgaaggccgggcattgcctcttctgacaccaatgtctgaggttgcgggcagaatggcggcgcaaatcggcgctcaattcttagaaaagcctaaaggcggaaaaggcattctgcttgccggggtgccgggcgtttctcgcggaaaagtaacgattatcggaggaggcgttgtcgggacaaacgcggcgaaaatggctgtcggcctcggtgcagatgtgacgatcattgacttaaacgcagaccgcttgcgccagcttgatgacatcttcggccatcagattaaaacgttaatttctaatccggtcaatattgctgatgctgtagcggaagcggatctcctcatttgcgcggtattaattccgggtgctaaagctccgactcttgtcactgaggaaatggtaaaacaaatgaaacctggttcagtcattgttgatgtagcgatcgaccaaggcggcatcgtcgaaactgtcgaccatatcacaacacatgatcagccaacatatgaaaaacacggggttgtgcattatgctgtagcgaacatgccaggcgcagtccctcgtacgtcaacaatcgccctgactaacgttactgttccatacgcgctgcaaatcgcgaacaaaggggcagtaaaagcgctcgcagacaatgcggcactgagagcgggtttaaacaccgcaaacggacacgtgacctatgaagctgtagcaagagatctaggctatgagtatgttcctgccgagaaagctttacaggatgaatcatctgtagcgggtgcttaattcacaatgagcttgcagaaagatttctgcaggcttttttattttttaaaaggaaaaaagagaccatttcacgaattatgactatgaagttgatcataaaggaggattcatatggctgttcagcaatatggcgtgttaaaaggcatagtcttagacatgaagcgggaaacagatgatgacagtcctcatttccaagtcaaaatgctcggtgaagagaatacgtattacaggtgcgccatcaatgtgatgtccagttctgaggaatctgaagtattgtatttggctgacgatcagtttgattcgggctcaattaccatccttccgaacatgccgtatggatatacaaggatcaatgaagcaaaccgtgaagtggcactggattatgtgcggggcaatttgtttgacccgcgggaaatgaagcctttgcctcatgaaatcacaggacctgataatgatttaaatgattttattgaaacctatatgaagaaagcacaagatgagaaagcgccggtttatatattcggttcaaaattcggccctgaacaggctgcagataaaatattcggctttaccccgactaacggaatgcacaatatccatatgaatcaagggaatgcaatggatacgcgctggaaaaaagacaacggctcttggcatgacgggggtattctgattcagtttgcagatcagtgggccgctgtgtttttagcgtttttatcccaatcttggtgtaccgatgaaaacggaaacccggtcagagattgtgatcatacccaaacgtctgcgtaagatagaaaaagagactgcggcgagcagtctcttcggaagtttgttgacaaaatcctaaagcgttttaaaagctttaggattttgtcatgttttcagcgtgattgaaaacccttgaactctaggaaagatgagcattggagcggagcgaatgttctaattcgtgagcaccaacgcgcagacttggcaacgaatgcgagggtttatcgacacgctgaagagactgcggctagcagtctctttttgatcagattacacattttcaacagtctttaggctgtttggcctcatatcgctccaatgcgattggatatagtccaaacaagcttcacgccctttttgctcatgaacgactgtccagccgcttggcacatctataaaaccgggccatagggaatattggccttcttcattgatcagcaccaaatatgtgccatccgcattttcaaaaggatttgccattctatttctcctcccttatttattcaactcttccagtttgacagcgagaaccttgccgatttgagccagaggttccggctgacataaatctttatgacggcagtcgatgtcgatttgttcaatctgtctgctaatataaggcttccaagagtcaggttcaatcgggtcaaaccattcaggaatgattgttgatctgaaaaacaaaacatttccatggaaggttttcggcttataggaacctaaaatgccgacagaattgacatacgtattcttcaaatttaaaatgaccgtttcatccaggctcgcaagcgcactgccgtcacggcgaagaatctcaatcgccgcttcaaaatctagcggtttgtcccctaagctgtctggatcgtacccgcctaacgccagaagggcaataagcgcttcctcatcatccggtgcctcttttataggaaggaagtggttcggataggcgtccagcatcaccaacagggatacttcttctccttgattttgcagctgggtagccatcgcttgaacgacattcccgcccagggaccagcccagcagatggtatggaccttttggctggaccgttcggatttgtttaatgtaatcggcagccatgtcatcaagtgttttcggaagctcctcgcgctgcccgattccccgtgcctgcaagccgtagattggataatctgttcctatattggtcatcaaaccggcataacaccagctgagcccccctgccggatgaacacagaataaaggaggcttgtctccacttgttcggagcggcagcagaacgtcaagagcgctttggcttgatcccatttcaagtctttcagcgagcccggctacagtaggtgcttcgaacaagttgccgatgctgagttcaacgccgagcgcttcacgaatgcggctcatgagctgtacagcaagcaaggaatgtccgcctaaatcaaagaaacggtcatcaatgccgacacgcggcaagtgaagcacctccataaagaggtcacagagaatttcttcctgtggcgttctcggtcctcgtcctgtcactgccgctgcgaaatccggagcgggcagtgctttacgatcaagctttccattcggtgtcagcggcaattctttcatcatcacaaaggccgcaggcaccatgtaatccggcagtctctcagcagcatatttgcgcagttccgccgtatcaaatgtttcttccgaagggatgacataagctgccaaccgtttatctcccggctgatcctcacgaacgattactgccgcatcttcaagctgcggatgctgaacaagcgcggcttcaatttctcccaattcaatccggaatccccgaattttcacttgatggtctgcacggccgacatagtcgagagaaccgtcagcgcggaggcgggccacatccccagtgcggtacatccgggtgcctggaggaccgaacggatcagctatgaagcgttcagatgttaaaccaggccggcctagataacctcgtgctaaccccgctcctgatacatacagctctccggcaacacccggcggaaccggctgcaggcgttcatccagcacgtatacaccaagatcgggaatgccgcagccgatcaagctgtttgcccgtaaagctgccatgcttcggtctaattcgatatagctcacatgcaccgtcgtttctgtaataccatacatattgataagctgcggtctattttcagggtggcggttgtaccaatcctctaaacggctgagttcaagcgcttctccgccaaaaatgacatagcgcagactgagtgcctgtccgagatccggctgttcccgttccgcctgcataaactgatagaaagcagacggtgtctggttcagaacggtcacaccctctttgacaagcaggcgcagaaacgcttctggcgatctgctgacgtggtgaggcacgattacaagacgtccgccatgcagcagaggaccccagatctcccacaccgaaaaatcaaacgcataggaatggaacatggtccagatatcatctgagctgaaacggaaccagtgctcggtcgctgcaaataaacgtgttacattttggtgaggaatcatcacaccttttggaacacctgttgagccggatgtataaatgacatacgccgtattcaaaggggaaagcggctgagtcctatccttattttttggattacctgcagggtacgtgtttagtttctctgccagctcgggatcatccagcacgattttcggcacgttttcaactggcggaatgtgatttgcagctttagtgttcgtcatgataaacgcaggctgtgcatcttttagcataaaagcaattcgatcagccggataatccggatcaagagggagataagctgccccggcctttagcaccgccaataggccgacagccatttccaacgatcggggcagtgccaatgccacaaattgctccggcccgacaccttcactaattaggaatcgggcaagccgatttgctctttcattcagctctgcatagctcagtgcctgatcttcatatacaacggcaatagcatcaggacgtaaagcagcctgcttctcaaactgctctggcaaacttgcgtgcggaatcttttcagatacactttgccaatctgtcaccatgctgctgcgttcctctggcgcaagaatatccagatttccgatttgctcgtcaggatcagactcggcagcctccaacagccgcatcaaacggtcagcaagagcctgagcagtttcccgcttgaaaagatcagtgctgtattcaagcagtccttccattccgtttggtgtcccgtcagcaaggcgatcttcactgatttccagcgtcaaatcaaacttggcagaaccgacactgttgattcgcaggctactctccatatcaggaagatgcaattcagcgtccggtgtgttttggaacgcaagcatgatttggaataaaggatgcgtcgcacgcgaacgagccggattgagcacctctacaagtctctcaaacggcagatcctgattgtcataggcggccagattcacttcccgtactctgtctagaagctcacgaaagcttgggtcaccggacgtatcagttctgagcaccaatgtattaatgaacagccctacaagatcgcccagcgcatcatcattccgtccagcgatcggactgccgatcggaatgtcggtgcccgccccgagccttgtcaataaagcggcgagaccggattgaagcaccataaacaggctcaccctatttgcgcgagccagctcctgcaatcgcttatgaagctcgggctcaatacgaaaatgaatcgtatctccatcatgactcggctcagccggacgtgaataatcggttggcagctcaagctgatcaggcaggtttttcaaggtttctttccagaaagcaagctgtccggcaatcaagctatttggatcatcctcgtttccaagcagttcttgctgccaaagcgcatagtctgcatactgcacagcaagaggcgcccattctggagatcgtccgtggcagcgagccgcataagccgtcccaaggtctcgggtcagcggtgttaaggaccagccgtccccgacaatatgatggacgagaagaagcagcacgtactcgtcaggaccgatcacaaaaagctcggcacgaaaagcaggttcagctgcaagatcaaagctgtagcgtacagcttcggcaagccgatcagaaagctccttctcagcaatttcagtaacatgtaactcgggacaggcttgatcagcatctaaaatatgctgataggatgtcccctgtgattcagggaagattgtccgaaggctttcatgacggcagacgaggtcataaagtgccgctttcagcaatccttgatccaactcacctgacaaacggacagcaaccggaatattataagtaggactcggtccttccagacaatgcaggaaccatagccggcgctgggcaaatgagagcgggatcttttcaggccgctcagctctctgcaaagcgggacgtgcactctgcgccaaatcaagatgggcagcgagtccggctactgtcggttcgtcaaagagcttggcgataccaagttcggctcccattacctcgcgaatgcggctcatcagacgggctgcaagaagagaatggcccccaagctcgaagaaactgtcatcgataccgacgcgtgccaaaccgagaacctctgcaaacaagtcacacaatatctcttcctgaggagtccgcggggcccgatcactgacagatgtgctgaagtctggtgccggcagtgctttccggtcaagcttgccattaggtgttaacggcagctcgtccatctccacaaacgccgccggtaccatataatcaggaagactggcccccatataacgacgaagctctgcagtatcaatagcagtatcagcgactacataagccgccaatcgtttgtctcccggctgatcttcccgtacgacaaccgcggcctgttcaatgtgcgggtgattggcaagcacggcatcaatttctccaagttcaattcggaatccgcgaattttgatttgatgatccgcccgcccgatataatccaaagacccatcggcgcgccagcgggcctggtctccggtccgatacatccgagttcccggcggtccgtatggatctgcaacgaagcgctccgccgttaaatcagggcgatggaaataacctctggccaagccggttcctgcaatataaagctctccgacaacgcccggcggcaccggctgcaatccattatcaagcacatacacctgcgtgttccaaatcggtttcccaatcggaggaacgccctgcaacccttcttcaagaaaagctgcggcagaccaaatcgttgtttcagtgggaccgtataagttcgtgactgaacaatgaaggtcttgaagcgcctgcaaaagaccgctcggcagcgcctcgcctcctacaagcactctaagcccccgaagtttctcaggttcactcgttaccaaagcgtgccacagtgtcggtgtcgcctgcatgatgttaatatcgaaattttcaatcatttgagctaatgcctgcggctcacggatcgtttcttttcttgcgatcacaattcgcgctccgctaatcagcggaagatataactccaatgctgaaatatcaaaagcgacagtcgtcacagccaacagcctgtcttcttctcctagagaaaacgcctccttcatggacagcagaaaattgtttaagcttttctgtgtcacaacgactcccttcggtcttcctgttgatcctgaggtatagatgatatacgcaggatggtcaagagaaaccgatacatccggattttccggcgaatagcgttttataatctcctgtgtaacagcctgatcaagcacaagctccggtacagccaggttatcaggcagactggctgctatttcctcagtcgttatgatgcatgaaggtttcgcatcctccagcatgtaagaaatgcggtcggctggaaactccggatcaagtgggagatacgccgcaccagtcttgagcacaccaagcattgagaccaccatctcaggggaacgcggcagcgccaaagcgacaaattgctccggaccaatccctttttcgatcaacagacgcgcgaggcggtttgcctcttcattgagctttcgatagttgacttgaatgtcatcacacatgagagcgatacgttctggcgtaagaactgcctgcttttcgaacatgtcctgaaggctgaccagcttctcggattttgccgtctcattccatttagaaatgactttttctttctcctctggcaacagaagctccatttgcccaatcagcatgtcctctccggcagaagccgtttgcagcagctgcaaaatacgctgctgatgaagcttaatatcagactcactgtatacctcgggattcgcatcaacatcaattcgcagcccgctgccgtctgttctgtcatatacattgattgatagatcatcaacaggaccggctgaaagattatgcgttgtgccccggacgccggcaaagtcgagaccgtaatcaaacggcataagattgatttgagggccaaataatctatgattttctcctatcaatttcagatcgcgccgaagctcttcatggcgatacttatgatgtcgccgaatactgcggatttcccgggaaatttgctgaatcagttcagaaaagctcatcgaagagcttaccgtcagccggagcgggagaaggttcatcaccatagccggtacattcagtgacgcggaccctatccgacccatcatgggcaggccgagcacaacatcctcagagccggtcatacggtgcacataaacagctgacaccgcaatcatgacttcatgccagcttcctgagaaatagcgcgccgcttcttttaacgcgtttacatcagacggaggcagatatgccgtatgacgaagaaaactgttagatgttcttggcgcccgatcagccaagctcacaacttcaggtgcatctgcaaaacggtccagccagaattgacgatccttctcatactgctctgatccgcgataatctgtatcctcctccaaaatggcctggagagacccaaaggaacggcctttagctgtttgtccttttataagcgcagtatatgtacttgccacacgctgggctatcagggaaaaaccgaagccgtcgatcgctatatggtgaatgcgctgataccaaaagaaacgatcaggcccggcaataaacagagcttcattgaacaaagggtcataccctaaatcaaccggctttgctaaatcagctttcatccagtttaatgctgttttttccggatcaggctcagagctgacgtcaatgacgtgcagctgtacatccggagacgggtttatcatctgccaaggcccgtccatattttcaccgaagcggacatgcagcgattccgcttccttgatcacgtgccgcaaagcttcttcaaaaagagcaatattgactggtccattgatttctatatattccgctgtattgtagattggattgtccggatcaagctgctgagcaaaccatatgccagtttgcgccccggtcaaagaatattgaagatcttttgtatcaggcatccgtttgtttaccctccttttataaataatccgcgtttggcagcacttgctggctgcgggttgtgagcaatttttgccattcttcgatcgttgggcgttcagccaattccacgaaagtcacctctgccccttcacggcgccattgttccaccaatgtcatgatccttaccgaatcaagaccacgatcgagcaaatcctcttgatctgtgatgtcttccggtgtttcttgtagaagctcagcaatttgtttacggatattctcacatgtaaacacgttctttttgccagtgtttgctgacgttttttgaacgtctgccggcgcattctgcagctgatcaagaagactgtcagtcatcacggtaaacgcacagcgtccagccgcatagtccagcgccatttgatgtttttctaatgaaaaatcagcaactgcatctcccacaaaaaaggctttaatatcctccataaatgcttcacatgctgtaacaagacagccgatatgggcataaattcctgtaatgatcagctgatcgcgtccctctttgcgcatcatttcaagcagattcgttctcttaaacgcgctgtatctccattttgtcagcacaagatcatcatcctctggtgccagctcggttataattttctcctcataaggaccgctgtttaatcccgggccccaaaagtctgtcagcagcgcacggtcatccggattttggcttcccggctgtgcggtatagacaacaggaatcccaagctgaacacattgattcttcagctttcgtatattcgctgaaagctctattaccggagacgctcccgctgtgaaagcatcgacaaaatagttttgcatatcgtgtattaacaagacagcccgattcggatcaggcacccatgatactttgttttgcggcatatcagatgctgtcggcatttgatacggctgaatggcaggtatagccatatgaacacttcctctcaaattgttgttttatttttttaatcctgcaagaagcttctcggaaatggcttcacggagcgcttttttgctgacttttcctacccctgtctgcggaaaggattcgacaaattcaactcgatcagggattttatatgccgccagtccgcgctctctcaaaaatgctttgagctctgcggcttttggggcttcatcccggggaataatgaacacacaagatctttcgccaagaaattgatcaggcatggagaccattgccgcatcatggacagccggatgcgccagcagatgattttccacctcttcagccgcaaccttttctcctccacggttaatttgatccttcgcccggccttcaacgacaatatacccgtctcgtgtcagcctgacgatatcacccgtacggtaaaaaccgtcctcagtaaatgaagcggcgttatgctcttctgccttatagtaacctcgaattgtatacggtccccgcgtcagcaaatggcctgtttcaccaggttttacgtcgcgatcatgatcatcccaaacacgcacttcatcatatggggacatcggttttccttgggtgttgacaatgatctcctcaggatcatccaatctcgtataattgacgagaccctctgccattccgaacacctgctgcagcgtgcagccgaaaacagcttttaccctgcgcgcggcttcagcactaaacttggcaccgccgacctgcaacacttgaaggctggataaatcgtcacggcgtgaggatgccgcatccatccataccatcgcaagaggcggaacaagagcggttatcgtgaccttttcccgttcaattaaaggaaatgcgtcatctggacttggagaaggagataataccactcttcctccagcgtataatacgccgagaacgccaggtgagctcagcggataattgtgtgccatcggcagcgcggccaagtacaccgtgctgtggtcgagccagcagacctccacactccgcttcaggctgtatatgtagtcatcgtgggtcctcggaatcagtttcgatagcccggtgctcccgccagaaagctggaggaacgccacatctgaagatttgacttcaggcagttttacaggttctgtatgcaaatcctccagcggcaaaaattcctctgcctcacctgcgacaatgatgtttttcaaagtcggcagcttgctttgaacctgtctggcaagcgaacggtagtcaaaaccggaatatgcgtcgggaatgatatatgcagccgcttcagcaaactcgcaaaaatatgtaatttcactgcttcgatgagaaggcagtgcgaagactggaagcgcccccagacggaatagcgcgaaaataacttcaaaaaactctttgatatttggcagctgcaccacaacacgatccttctgttgaatgccgagcttctgaaatccggcagccaggcgatcagcccttgtgtccagctctcgatagctccaatgggtgtttccgcatgtaatggcaatgcgatcaccatatttggctgcccggtcccttaacaaatctccaaacgtctcaccggcccagcagccgttctttcgataggtctcagctaactcatcaggccaaggcgtaaatcctttcagcatgttgtatccctccagcaattcattctgttcatatgtgatccacgcccattgcccgcagcattgtccgaaactttgcggacgtctcctgaagctcgtcctcgggctttgaaccggccacaacaccagctccagcatacaggcggagtgagcgttcttctgcttctgcacaacggatggtcacgatccattctccgtcaccggcatcgtcacaccatccgaccatgccggtaaagaaaccgcggtcaaatggttcaatgctgagaatcgcttctcttgcaagatcagtcggtgttccgcagactgctggcgtcgggtggagagccgctgccaattcaagtgcggttacagacgggtcggaaagctctcccttaatcacgctggacaggtgccacatcgtttccgttttgatcagtgaaggcttctccggaacctccagcgtccggcagaaaggtctcagcgctgccgcaaccgcgtcagcgacaaccgcgtgctcatgaagatcctttgcggaagaaagcaattcagctgcccggcgctggtcttcaacaggatcattactgcgcggccttgagccggctaatgggttggaaacgacctgtgttcccatccttgaaacgagaagctccggacttgctccgagcaatgttcggcggggagacgtttcctcctgactggacacgtctgcggcaaacgtgtagccatgcgagttatgctgagccagatggcgaagcaattcatccgtctgaatcggttcaggcgatgtcaaatgcagcgacctggacagaacgattttgctgagtgttccatcggcaatgcgtgccagcccttgttcaacaccatttttataatcctcaggttcaggaacaggctttatgtgatatgtatgcccagcctgctgttccttttcctcatgatcaaattgaagcggtcctgaccagcgcacttcttcaggtacaacgagccgcgctgcttttacttgatcaaaaggaacggccccgacaacaagcggccggctttgccctgattgttttgcctgacgtaacgcctctgcaattcggccagaaagggtttccatttggttttgcccgtctgcctccggtacgatttcacatatgcctttcgctaacagtacacgatgaggagacgctaagaaaaaggcgcccggctgatattcatgaagcaaatgctccgcttttgtttctgttataacgttttgatccaacattctcatgaacctcctttaaattcagttacacgcctaaggtcgcgccgccatctacgcataaattatgcatcgtaatatgccctgcctggccagaaaccaaaaagagcaccgcatccgcaatatccgaaggcttggctagttttttgagcgggatccctgttttaaatgtctcaagtgatccttttatgacttgctccgctccattctcgtcggcccataatgaccactgcatgtctgtttccgttgatccgggagatacaatgttgcagcgaatattgtattctgcaagctcaaggccaaggcatttcgtaaacatcacagccgcagcctttgaggacgcatatgccgccatagatgttcttggtacaccggcagcattcgatccgactgttacaatcgaacccgatcttcggtccatcatatatttgctgactgaacgcgaggcgttaaatacgccagtcgaattcactgagaacgtcgcctcccattcctcatcgctaagcgaatggatcagtcccgggcgaaggacacccgctacattcactaaaatatcaatcggccccatttcacgttcgatgcgcgccgtgatctcatcaatcgccgcgctgtctctcacatccgcaggaaaagcttctgcatggcggccttctgctttgaggctgctcacaaccttttccagcttttcaggattataatcaaccgccgcaatatgtgcgccttgactagcaagcgtccgcgcaacagcttcgcctattccttgggcagcccctgttataaaagcaatttttccctctatactctttgcattcatatcatcaattcctttcttcgctctaaatgccgaacagacatccagcgaaaaagactgctgcgccttgaaaaacgcaatctattgataatgattatcattatcaattataaaaataatcatatccaaatgtcatgtgacagtcaaatataatttcagtgacaaatatttttttaaaggcaaggctgagtatgtctcagcccattgatagatgcggtccgtcagggtgaagcgcaaaacgcagcgccctgctgaccaaaacaggaagaactgaaatatgtccttctcctgaaaactcgcaaaattctgcccgtatgccttgttcagataaaacggccagccgctcataaagctcccttgcattatcattcatccggcttttatgatgctgctctaattctcctgcggcaagcaggatattgataggctgattgtttttcttggtgagagagacgaaatggtccgttttctcgagaataaacggtttattccaatgaatggacggacttcctgcgatatacgtttgaaacgcatcgggctttgttagcagcacctgcagcacgaaaagccctccgagcgaatggccaaagattgtttgtctttttttatcaatctggtaatctcgttctatctccggttttaaatcctcttcaataaatctgaaaaagccctccgctccgccatgctccggccattctctgccgtcgggcctttccggcagcttcgattgggctgttggcattgtaaaatcccggtggcgtgctgaagagaacggctccgctgtctcatagccaatgccgacgatcactgcagggatcaccccggttttttcgggtcggcgtccctgtattcgaacggcttccgtcatcgttccgaagacagaattggcatccagcagataaatcacaggataaccagtgggtggcggcggcgtactaggtttcgagataaaaatgtgataggtacggttttcattgcgtgaagacatcatacgcacttccgtaccaggaatcgtaaatgcgtttgatgtcccgctatttgtccggtctgttgtttgctctttcatgcagtacgacattcctctccttaaactaaaccgcaatgtatgataatgattttcactatcaactagacacctcaaataataggttttcttccaaagaaagtcaactttttcccgaataaaaaaggcaccttgatcaaataaggtacctgcagactatcaatatggaagtaaaaacctaataaagatgcggattgtcctatttgaaatagaaccttaatcccatgtaaacctttgattttgccaagggtcgcctctcatgtgatagccattccgctcccaaaagccagggtgattttctttcgtaaattggatgccgcgcagccacttggcgcttttccaaaaatatagatgcggaaatacaccccgcagcggaaagccgtgttcaggggttaaaggttcgtcattatgcgcataagccagaagggaagtttccgctaagaaatcatcaagcggcagattggtcgtccagccctcttcagcatgtaaaataacgtagcccgcttcttcttttacacccgctttttccgctatatcacaagcccgcaccccttgccacacattatcaagccttgaccatcccgtgacacaatgaatgtcgttttttgattcataccgtggaaaggctttgacatcttcaaagcttagcagcatcggatggtcaaccaaaccgtatacttgaagattccatttcgtcatatcttcgtaatatgggacatctccggtatgaagcacaggaaatgaagtggtgacgttttgatttggcggcactcttccagattgatcggactgtcttgtttttccgaaatacatatgggcctcctttttgttaacctattttaaaatcatgttgacaatctttttgttctttattactctatgattgtgtatgtcaacctaagggggaacaacgatgaaacaacgtaaacttcgtgcgggagatatggcgctgattggcatgttcgccgcacttatggctgtcggggccaacattacatcagtagcaccctttttacaagtagccggcattccgctttcgatgcagccgtttttctgtctcttggcagctttgcttcttggcagcaaacgagcagcgattgccatgattgtatatgcacttgtgggattggccggagcgcctgtgtttgctcaattttcagcaggcttcgcaccgtttgcagggaaaagcggcgggtttattatctcatacattccggcagcatttgtagcgggatggtttttagaacgaaacattcagccaagtaaaattcgatttctcattgcttcacttatcggaacggcgatcatgtatctcatcggcactacctatatgtatcttgcactgaagctgtggattcatacgccagtgagctacggcacggcttggggctttatgatttggtttatggtaaaagatacagcgctggctgtgatactgtcgtttatcgcaccagcaatctaccgctctattcataaagcaaccggctttaacagaaatcacatatcatctacgtaaaaaccgttctattggacggttttttatcataacgagaaaaggctccccagtaaaggggagcctttttcctataaaacaagcgctgcaatccagccaaagatgacaagcggaatattataaaatataaatgtcggcacacaagtatcccaaatgtggtgatgctggccgtccgcactcaaacctgaagtcggcccaagcgtactgtcactggcaggtgaaccggcatcgccaagcgcagcagcagccccgataatcgcaatcgttgccatcgggctgaatccaagctgcatgcatagaggcacgaaaatggttgtgataacaggaatggtcgcaaaagaagatccgatccccattgtaattaataagccgacaatgagcatcagcaatgcgcccaaggactgactgtgtccgataaaaccagctgacgttttgaccagtgactcgacatctccggttttcgtcaatacgtttgaaaatccggctgcaacaagcatgacaaagccgataaaggccattaaaaccattccatcagtaatcagtgagtccgcttcatcacgcttcatcacaccgctgacaaacagaacaatcagaccagcgagcgcccccataatcattccttctactcccaaagtctgagataagtaaagctggacgccgagtgacacaacaatggctagaaccgcgataccaatgctttttctcgtatatggcgatgcttctgcacctgaaatgtcttttgtttcatattgtttcggtttacggtatacgatcactgataaaataaggccgacaaccatacctgcaactggaataatcagtgcgtacggaatatcagcaagcggaacgtttaacccggcatccgccatattgtccttcagcatgccttggaagatttggccgaaacccaccggaagcaaaatataaggagccgttaagccaaatgtaattacacacgcgatcagacggcggtccatttcaagttcattaaagattttcaaaagcggcggaatcagcaccgggataaacgcgatgtgaaccggaacgacgttttgcgaaaaacaagatacaattaaaataatcagcacaatcagcaccttagaaagtgctttttttcgagaatcttccttatttccgattaatttaacggaggcttccaccattgcgtccggaagacctgttttcgtcaaagcggcggcaaacgcgccaagcatggcatagctgactgcaacggtggcatttccgccgagaccgtctgtaaaagctttaaccgtttcgccaagaccgagcccgcctgttaacccgccggccaaggcgcctataattaatgcgataacaatattgacacgcagcaggcttaatacaagcataagcaggactgcgatgacgactgcattcatgatgatacccctccaaaaatcctttagtttgctaatgtagtagataaataaagtacgaacgtatcgtatcataaccgatccactttagtcaactaaagatttcggaagaaaaaatccctgccgcatcatacagcagggatttttcattactcgtttttatcttcttccaatgtaaatcgctccgcaagtgtagccagtgttcttgccataacgccagtagccccggccggcccgaagcaggttgctttattggcagtcgctgttcctgcaatatcaaggtgaacccaaggtgttgactcagcgaattcaccaagaaacgttcctgccataatcgcatgtccctcgcgtcccggtgaattgttgagatccgccatttggctgcttttcacgcgttttttatccttctctgttatcggcagctgccagattgcctcgccgcactcttgtgcagcatcagctacctgctggtaaaagctttgatcatttgtcattgcaccggttgtttcagttcctaatgccacaacgacgccgccggtaagcgtagctacatcgacaagaactgacgcgccatgctgtttcgcgtatgtaatgccatctgcaagcactagccttccttcagcatccgtattaaggatttctattgtttttccgcttaaagatacgatcacgtcatccggcttcatggccccgccggagatcatattatcggttgatggaataacgcacagcacgttttgctcaggacgaagctctccgatcgtttccatagcaccgagaaccgcagctgctcctcccatatctgatttcatgccgacaattccagatttcgttttaatggagtagccgcctgtgtcaaaggtaattcctttcccgactagtccgacgacgtcctcccattcctttttgccctgatatttcaacacaatcattttcggcggttcggtggagccttggtttaccgcaagtattccgcccataccgagctcttccatctctgatttctccaatatctcacactcaaaatcatatttcgccgcaagctcttcagcatacgaagcgaggtcagtcgctgtcagcatgtttcccggcatattcacaagcgttctagccgaatttgtcccttgtccgtatgcctggccgacgcgaagcccggcctgcacttcctgtgtatcttcatctgttacaacatacacggcttcaatttgtttgtcaggctcatttgatttgtgcttataatcctgcacctcataggaagcaagcaggcagctctcagctaaagcatgagcggcatcggctggaggcacgtcttccgaaataaacgtatcaagcaggacagcagtttcttgttttcgatctttatgaatggcttgaaaaacatgagcaaaacgttccttcgcctgttcaaacgaataattagcttctctccccagaccaacgaaataaatccgtttcatacccgcagaagatggagggaatacttttgatacttgattcggtttcgcagagacatcaccctcttttaaaagctgtgtcagatggccttcgagcatttcatcaatttccaacgcttttcctgtcagctggcttttttgaaaaagcccgaccacaagggtttctgtatgctctgattgttgaaccgcataaaacatgaggcttacactcctaacgtaatgggtatttgtaatgaacaatggtataataggaaaaacattctttccactatacttattttaacaaacaacagtctaagacttgcttttttcttttgaaacacgaaggatttttcaaatagaaaggatgtcgccgatggaacttttaacgaattttcctttattatcaagcctggccgcaattatttttgctcaggtcatcaaagtgcccatacagtttatcgtgtccagaaaactggactggtcgctggtcacaagcacaggcggcatgccgagctctcactccgcagcggtcactgcgctttctacaggcgtagccttggagcatggattagactcctcactctttgcggtttccgccattttcgccgtcataaccatgtttgacgcaactggcgtcagacgccacgccggtgagcaggcaacagtcattaataagcttgttattgattttaaccgtttcgtaaatgaagcgaaggacttccctaaggctgcagagaaagaaaagcaaaaaaagctgaaagagcttctcggacatcagccgatcgaagtctttttcggaggcctaacaggtattttactgacattggtactcgcttactttttcatgtaaaaaaacgctcctgctttcgctggagcgttttattctttcacagttttatattgatttctgaacacttgcaaagattttgtttcattgagcttctcaagctcatcctcggtaatctttcccattccctttttaatcacatatacatcaagggtttttttgccccattcattgtatacatctttgactgtctcaaagtacagatcaaggcggtttcccttaatagctgatcctgtgtcggccacaactccgagaccgtagttcggaatgaataaaattgttccgatcgggaaaacggacgggtcagcagcaaccgtggaatataaatcccgtttcactttcacacctgaatatgtaagcccgtataatggatcaccgggatttttgcccgtcgactcagctcctgctgtgtagcctgttgctgttactctttggactggatattcatcccaatcaaatgcctcttctaacggttttgttttatcctcagccgcggacgtggtttgtgtttgtttctgctgcaatgcttttaatgtcagtcctgcatgcttcaagtgcttttcctgatgttcctgcacccattttgacaagtccttcgcttcaattcctgacactgataaaaatgtcgtgccaaatgcaagcagaaataaacaggtcatcagcaaacgtctgatcatattcaacatcattcacctctcctccgaatcattgttcccaagtggagagagcattattcaaaatggtgaatgagctgaacgcataaaaaaagctttctttagaagaaagcggcatttaaaacatttgatatcctctttttctgagcatgttgatcgctataccggacacgatggcgccggccaaaccgctggctaaaatcagcacatcggcagccgctaatgataagacacgatgaaacagactggcaaaggattctcccggcgactggacatagctgatcagcttttctttgctgataatgaaaaggcatacaatcggataaatcacagccataatccaagacattctcagcagcatgtttaataagaaaccgattccaaaaaacaagacaaaaaacaaaacaattgagatgattacgactggcagactaatcaacctattccaccccctgcgttgtttttagtgtaacgcgggggctgaaataaagtcaacggctggaaaaagaatgactgtcttttcctgtcccctggcaagacggacaagtctctgaaccgccgagaatcaattgaaaatatcctttccctgaacaaaatgggcatgcatgtgaagcggttgtcgttgcagttttcatctaatcatcacccttttttctcaattttctgataatataccatatcaagctgtcaacaataaagtcagatcatgtgacaaatcttttgatgtaagcggaaacatacttgttttcctctcgttctctttttattttggcgttttttaataaagaaaacccgcttccgcgggtttttagaaaaacttgaacttgccttttttcaatgtcagtccgagtccgccaatcataaacagcgagcggttatcaatgacttttttcataaacgaagcgggcgtgcctttcagctttctgccataaacaaccccaaccgcgttatgctcgccaagagaagccactgttcccttaatgtccggcttgaattcctcaagctctccgcctttaataagcctgccaaggtttttagcgaccgttatgccctgctgcattgcaatttgcgcagtaggcggatacggacgctctgtatcttcattcataaacagcgagctgtcgccgagaataaagacattgtcatgtcccggggcgcgaagatcagggttgactttcacccggccgcgcatattttcaaaaccggcttcctccacaatcggatggccgcggacacctgccgcccaaacaacggtttgcgatttgatctgctctggttcctcatcttttttgccgactctgactccttccggggtacattcttgtacagccgtgccgatcttgaactcaactccgttttcctcaagataatgtacggcgtaatcaacaagttccggatcaaagcccggcaaaacggtcggcgctgcttccacacaaatgatgcggacaaggcttctgtcaacgtcatattccttacagagctccggcacgcgagcagccagttcgccaagaaattcaattcccgtaaatccggcaccgccaacaacgatcgttaacctgtccggccgtttttccgcttccgtattgtaagtcgcaaactgcagctcaatatgttcccgcagcaggcgcgacgtgttgatgttggcaatcggaaacgcatattcttttaagcctttaatgccgaacgtttcaggcacggcgccgagcccgatgactaaataatcgtactgcagttctccattcgcaagcacaacttttttctcatcaattttgattgcctttacggtatcctgtacaaaattcacccgtgactggttgattacatcttttatctgataacggcagcggtcatgatggagcgtacccgcgctcgcttcatgcatccatgtcgtttcataatgataattgtgtttatttacaagcgtaatgtcagcatcattcggcccgacatacttcgtcagccttgtcaccgtcatcaatccgccatatcctgcacctaaaatcacgattttgggcttattcaatgccatcacatccaccttctctttttttgcttttgttagacccataataaaatcatcatttgtgttagcttcagcttattggcgggattttatgaaatatattgaaaagttttttgtgaagtccttacccgtagcactattatcatgtttatccggctggcccaagaaacattcagaaaaagatcatttcatttggttattatcgtagcggcctgcggaaatattttcaagaacggatgggcacgttagatccttacgattttttctgctgactcgtcaatttgaacggcaatatggtataattaataacaattttcatttaggaggcaattttcgtatgcgagaggatacaaaggtttatgatattacaattataggcgggggaccggtcggcttattcaccgctttttacggcgggatgagacaggcaagcgtcaaaattatcgaaagcctgcctcagctcggcggacagcttagcgccctataccctgagaagtatatatatgatgtagcgggattcccgaaaatccgtgcgcaagagcttatcaataacttaaaagagcaaatggcgaaattcgaccaaaccatttgtctggagcaagcggttgaatctgttgagaaacaagcggacggcgtgtttaagcttgtaacaaatgaagaaacccactactctaaaacggtcatcatcactgcaggaaacggcgcattcaaaccgagaaagctggaacttgaaaatgccgagcagtatgaaggcaaaaacctccattacttcgttgatgatctgcaaaaattcgccggcagacgcgttgcgatccttggcggtggagattccgcggttgattgggcgcttatgcttgagccaatcgcaaaagaagtatcgatcatacaccgccgcgacaagttccgtgcgcacgagcacagtgtggaaaaccttcatgcgtcgaaggttaatgtcctgacaccattcgtccctgcggagctgatcggcgaagacaaaatcgaacagctagtgcttgaagaagtgaaaggcgaccgcaaagagattttagaaattgatgacttaatcgtcaactacggtttcgtttcatctcttggaccgatcaaaaactggggcctggacatcgagaaaaattccattgtcgtgaaatcaacaatggaaacaaatatcgaaggcttctttgcagcaggtgacatttgtacatacgaaggaaaagtcaacctgattgccagcggcttcggtgaggcaccgacagcagtgaacaacgccaaggcttacatggacccgaaagcccgcgtacagcctcttcattcaacaagtctttttgaaaataaataaaaaaaaggagcttgtgtctgcgacacagctccttttttatttgaagatatttatataattcaatgcagttcctacaaccagcgcaatcacaagggctgcgactacccagatcattgccataataatgcggtcctgaatcttttgggacttcggtgttttttcttcgttttgggccatcttattcgctcctttcctatgtccatgccataaagaaagcctggtgctgaacgaccaagctttgctgaacgtatatcattcgcgttttgatccgctctctaagaccattcgttaaaactatgatacctaaactcaccctgcatgacaagcttcggcacttgcaccacacctgccagcaaatcataatgtttgacatcctaaataaaacagagtacattatagaaggcgaacatttcatatattatacttttaaatattcgtttttaggagtgaaaaccatggaaaacgtatttgattacgaagatattcagctaattcctgcaaaatgcattgtgaatagccgttcagaatgtgatacatccgtacgtttaggcggacgtacatttaaattgcccgtcgtccctgccaatatgcagacgattatagatgagaagctagcgattcaattagccgaaaatggctacttttatgtcatgcaccgatttgagcctgagacacgaattgattttattaaagatatgaacgcacgcgggttattctcttctatcagcgtgggcgtcaaagatgaggagtatgaatttgtccgccagctggcagaagaaaatctgactcctgaatacgtgacaattgacattgctcacgggcactcaaatgctgtcattgaaatgatccagcaccttaaaaaacatttgccggacagctttgttattgctggcaatgtcggaacgccggaagcggtcagagagcttgaaaatgcgggagcggatgccactaaagtcggcatcggaccgggaaaagtatgtattacgaaaatcaaaaccggcttcggcacaggcggctggcaattagcggcgctgcgctggtgtgccaaggctgccagcaaaccgattatcgcggatggcggcatccgcacccatggcgacatcgcaaaatcaatccgattcggcgcaacgatggtcatgatcggttcactatttgccggacacgaagagtcgccaggccaaacgatcgaaaaagacggaaagctttacaaggagtacttcggctcagcctctgaattccaaaaaggcgaaaagaaaaatgtcgaaggcaaaaaaatgcacgtggcgcataaaggctcaatcaaggatacactgattgaaatggagcaggatcttcaatcttctatttcttatgcaggcggaacaaaacttgacgccatccgcaacgtggattatgtgattgtgaagaattccatttttaatggggataagtactaatatgcgaaaagcacccggatttgggtgctttttatgtgtaaaaaaatgttatatggtatattttagtaataaaaaatccttgtttctacattctttcttatcgtatcttagcgtcccccaaaagcttgtccaattaaacttgaaacatcctcctcggccagttcgatttctagtcggtgttaataaatacatgacatcaaattttgaaataagtaactccatttttataatttttccagtagtttcgtaaaacccacctagactccatacctcctattaagaaaaagttatttcattttccaaattatacatttataaacttgtcttcttttccactcgattctttagccatctatatacatttgctatattaatttcaaaaccttttccctctaattttgttagagccactgctcctccaaatacctcttccttatcttcctcttctgatagagcttttgttaccagagaagcttgaagtattgttgaatcaattatcctttgttgttgctcaaccaaagtttgaagttgttcaattgtttgagtttgcaactgcactgttgcatttaaaaatattatctgactcttaaaatgctggacgttagccattaattgctgaatttgaaggtcacttgagaagttcgtatatccaatatcatttaccattgatggtagctgcaaataaatttctaatgcttcttgtataatgtttaaagcttcatctgttgattctggaattactgtaaaaagtacattatttgcttgatgcgtaatttctgtagttgctttaatacctatattctttaagaattccgaaaaataaataagatattgttcacatgcaacacgaacatgttcagggaattcaaagatactagttagagtaccttccctattttttaaaatcaactgatttattgcttctcttgttacattgttagcgatacgtaaatattcttctaaacaattattagaattattattacaaataaactttaaggaataaccatatatatcagattcaatggtaatatccatccgttttgcgacatcattagcttcatatattaattcttctgtactaaaaatatttttccatttttcagtttcccaagaaaaatcaattaatatttcaaacattttatcatcaggtgaaaaaataaaaaatatactttgtttcaaaccagtaatatccaattcagttgggatttctattgttactgattttttatattcatttgcaagttggatcttattaaatggcatactggttatacttgaaacaacttcatttgcaatgacttcaaaaataatctcaattttataagtgaagagtttcaccttttctggttccatgatttgtttattaatttctaaaaaaggctcacccttataatctttaattataatcattatcttctcctcctttcagacttactttcatcgctcctttagcgctctatatatagtcgtttgcttatattatttaaactgtattaagcttattctcccttttattcctactaccgaataagtctaagggcatgttgattttcttttagtatatttcccctgtctttatttgtaaactcctctcttcttaacttcttcaattcatttgggtgcatcatatttaagataattggcataatcctaaaaattcaggagaataagtcgtttacatttcaatctcgtagtgtttgtgaagccaagtaacaaggagctccaattttactctcttaaggtttcctgtctcaagccttttgcatttttacctgccataactacgccaatttcttattccatagttgatttgtaatattaatttttggctgttttcttcctaactcttatttaataagaaaacttctagatatttatgtgattgacattaaatccagaaggattgtaattcacaattcttattatattttgcgcactaaacctcagaattcctcaggcccacctacatttgttgctttcttgaacaaagaatcgcagacgcagacgaccagtttacgatagatgaaaatacgaccatagcaaggtttatatacgatatgcacaagtattggtgttcgctatcctgccgccgaagtattcccctaactttacctaggttacatacactttaaagtacaattttcacaatatgaaatctctatcccgctctttaattctttctaaaaagaaatacttatatatttttcaatgcttttccattattcttgccatttgttttgcatttggattttcttcattttgcaactgttcaatgatgttcatataatccgtttcatttcggttctggcttaatttatatgccgcttgaatgtcttccaccttaatcttaaatccaacgatacctttcaattcacgttctaagagttttggagaaagcttatcccataaaacaggattgtcacgatgtttttcgtatttctccagcatgattgttaattcttctgctaattcatctttctctaacatacttgcttttccatacatgtggacagcctgataattccacgtcggaacattttcgcgcgaataccaggaagaagaaatataagcgtgcggtccctgaaacatcacaagcacatcttcacaggcttcaaacgttctccactgaggatttccataagcgaaatgccccgtaatatagtaatgatcatcttttttattgaatcctaacggcaaatgtgtggcaattggttttccttgttctgttgtgacaaccgtaccaaaggagttttcttgtacaaaattccaaatttcttcagcatttgtgactttaaaatattttggaatatacatcatcatccacccttcgaaaaatattatatgagtgttttagccatgattaaatccgtttgttcttcatcacccatataaaaagagtgggcgccggtctgaacaaaccccattttcttataaaaggcaatagcattttcatttttttcccacacacctagccaaatgttctttttattacgttccagcgcaatttctatcgctttattcagcagatgtttgccaagcccatttttttgaaagctgttctttatataaattctctcgatttcaagtgattcagcacccatttcttcagactgagcatcatcgatattgacctttacatatccagcgatttcatgatcaaagtaaataaaaaagaattgcgaagacatattggataactctttttccagctgctcagtgttaaatgcactttctaaataggctttcatattttcaggtgagttctgttctttaaaagtgtcattgaatgtttcaatactcaattgttgaagtgtttgtaaatcttcccggctgcattttttcatttttacactcattgttcggattcagcccctttatttaaaattcaattgtcttgtgtccctttttaatatatttaaacacggaacagatactgaccttgttaccattccaaaaatcttcttcatcatcaactccctatcgtgattttgttgcaaatgcaataaaatataccccgcattaaatatagcgtaactttgctgtatttacaacaaaaatcaaacaacaaatcagcgtttctcttgccgaagtccccggtactctctgcatcatttccccataataaaaacgcctcccttaacgatgatttatcgctaagaaaagcgtcagtaatagttgctatccgtttttagtgcttagcactcttcaggcttgcctgcattcgttgctgttctgaacgaagaaccgcagccgcatgaagcgatggcgtttggattgtcgatggtgaagccgccgccgagcatggattgtttataatcaatcacggtgccgttcatgatgtcaaggctttctttgtcaactagaacagtgatgccgtgctgatcaaacacactgtctgattcactcttttcatgctcaaagcccatgccgtaagaaagtccgctgcagccgccgcctttgacgcctacacgtagaaacgcgttttcttcttcatgctctttcatcatatcttttatatgcaaagctgctgcttctgtaattgttaccgggttgctcatcattgtgaacctccttttaaaaaccggttgctgtcttttattataaacatgatcgtcccaattctcaaacaaggtgttttacaagaaatagacaccctcacaaacggtttcagccggccctgtcatcattacatggccgttatctttccagtttatcaccaaatccccgcctgctaaatgcaccgtgatgtcttgatttcgctttgatacgccgtttaatacagatgcgactgccgctgcacatgctcctgtcccgcatgcctgagtaatccctgatccccgttcccagacgcggaaatgcaattcttgttcattcacggtttcaacgaattccacattgatgccttccggaaatctcggatctttctcaatcaccggccccagtgtcgttaagggtgcctgttcaatgtctgcgatcggaaaaacgatatgcggatttcccattgaaacggcagtgcctgttagttctacttcaccaaatgccatcgtttcattgattgtgtgctcttccccgccgtcaagcatcgggagctcggattttgtcaagcgcggttcgcccatatcgacagtgaccacattcacttttccgttttcgacttgaacctccgctttcacaagcccggagagagtttcaatcagaaaagatgtttcctcaaccagcttatgctcatatgcgtattttgcgacgcagcgcaggccgttgccgcagtttttcccttcagatccgtcattattaaaaatccgcattttaacaggcgcttggtctgatgggcatatcaggatcattccgtcggatccgatccctgtataaacagaagaaacctgaattgcaatctctgacagtttttcttctggaagctgttcttcaaattgattcacataaatataactgtttcccaggccgtgcattttggtaaatcgaaatgagttcataggtgcctccaactttttttctttttcttagtataaaagctattataagcggacacaatacaattatcccccgtttttcatacataaaagctccttgcactgacgcaaggagcttttatcgtttatataaacatgccggcaatggctgcgctgagcagattggctaatgttcctgcaagaacagccttcaggccgagacgcgcgatatctgaacggcggctgggtgctaatccgcccagcgtaccaagcataatcgcaattgatgaaaaattggcgaatccgcataacgcgaaactgataatggtagcagttttcttagaaaactcgccgatgtgcggaccgaagttagaataagcgacaaactcattcagcaccaatttctggccgatatagcttcccgcctgcaatgcttcatgccaaggcacgccaatcaaaaaggcgataggagaaaacacataaccgagaatggattctaatgttacgccttttaaaccgaacaagccgaaagccccgccgagaataccgtttactacagcgattaacgcaacaaacgcaagcagcatcgccccaacgtttaacgcaatttgcagtcctgttgacgctccctttgcagctgcgtcaatgacattggctgcgccttcgccttcatccattttgaaatcgctttttacggtttgcgttttttccgtttcgggtataatcaatttaccaaagactagtccagctggagcagccataaagctggccgccagcaaatattcaatcggaataccaagaagcgcgtacccaaacaaggtagatcccgcaactgccgatagaccgctcgtcataatcgtaaacaactcagagcgcgtcagcccggcaatcaggggtttgatcactaacggagattctgattgtcctacaaaaatattggcagcagccgccagagattccgttttgcttgttccaaggagcttcgacaatccgccgccaatgacacggaaaacgagctgcatgattttcaaatgatataaaactgcaatcagtgctgagaagaaaatgataacgggcagtacacttaatgcaaaggccggactgtctccgacctttagaagcggtccaaaaataaaactgatgccttcattcgcatagtcaatcagaagctgtacacggcttgaaaaccataaaaaaacagcgcgtcccgcttcccatttcaacacgatgtatccaaacgccacctgtgtgcataaaccaacgatgacggttcttatcttaatattgcttttcttttctgaaaataaaaacgcgatagcaatgatcgcaactgcgcccagcagcccccacagaacattcatgaatactcgtacacctcttaaattttatttaaaaaaatatcttttatacgataacaataatattttttgatgtctacacatttttttagttcttttgtacagcaaaataaaaaagggcctgtccaggcccttttctttaaaacattggattttcttcaataaaggtatatatattctcaacaagctcagcaggcgtttcacccatgacgacttctccgtttaccagagcgaaaagcgattccatgcatgtcccgcagtagcttaagcagccatattcaaggacatcaaggttgggatccttctccaaaatcgcccgggcttcctgagagccgtgagccagattgctgacacaaaattcaatcattggattcatgcggtttcacctcacatatgtccattatcgcgaatttttcactattcgtcaaagacaacggatgattcaaaatttattatcgtaacatattatttctcaaataacgttttactaatttgtgttttcaggctaaattgtaggttattttgaaactattattgtgattttagatcaaattcgatataattctagatgttattttacatagttcgtattttcttcaatgtatctatcatactcttcggattaaaggggaattcaaatgaaaaaattggtcttgatcggcggaggttacgggaacatgcgtgttcttcatcgcttattgccaaaccagctgcctgatgatgtttcaatcacgttaattgacagaaatccttatcactgcttgaaaacagaatattatgcccttgccgcaggcacaatttctgaccatcatatcagagtgtcattcccagagcaccctcgcctggatgtccaatacggtgatatcacatcaattgatattgtacaaaaacaagtgctgttccaagatcgtgaaccgatttcttacgatgacgccgtaatcgggctcggctgtgaggataaatatcacaacgtgccgggagcgcctgaattcacctacagtattcaaaccatcgatcagtcccgcgaaacctaccaaaagctgaataatctgagcgctaatgccaccgtcgccattgtcggagcgggcttaagcggcgttgagcttgcaagtgaattgagagaaagccgtgatgacctgaacattattttgttcgaccgcggtaatctcattttatcaagctttcccgagcgtttaagcaaatatgtgcaaaaatggttcgaagagcacggtgtccgcattattaacagggcaaatatcacaaaagtagaagaaggcgttgtgtataaccacgatgatccgatttctgcagacgccatcgtgtggacagccggcatccagccaaacaaagtcgtcagagacttagatgtggagaaggacgcacaagggcgtattgtattaacgcctcatcacaatcttccaggtgatgaacatctgtacgttgtcggcgattgcgccagccttcctcatgcaccgagcgcccagctggcagaggctcaagcagagcagattgtccaaatcttgcaaaaacgctggaatggagaagccctgcctgaatcaatgccgcagtttaagctgaaaggcgtcctcggttcactcggaaaaaaagccggcttcgggcttgttgctgaccgtccgctgatcggccgtgttccgcgtatgctgaaatccggcttgctgtggatgtataaacaccataacggttaatgatagagaagaaccgctgatcaagtcagcggttttctgtatacccatgcttctccatttcctcataaacgtcttttaattttggattgccttcaccgacaattttgtcttctacgagcacaagcggataaaaatactcgtcatttctgattttttccgcaagctctttcgcatgttcattgtcaggcggctcatgaatatcgatgtactgcatctcaaaaggctgatttggatattttcttttcagcgcagcctcaagccactcgtatgtatccttggctgtcggcatattgacacagctcgcacaaacggtttctgccccgtacacgcttagaatgactggtttcatcacttgtagacgcccccttctcctatgtaagtcctttcttttaagtatacagagccaaagggcgtttttatagaaaaaaaccgtttttgtgttgaagtctgaatgtgctataatagggagagcaactttgcaaaccaaacaatagatttttattgttacactgaatataatggttttatgacgacgaaaggagcgaatgtcatgactgaagttgaaatgaaagaacaggtgcaggaagtactggacaaacttcgtccgtttttacttcgtgacggcggtgactgtgagcttgtagacgtagatgaaggtatcgttaagcttcgtcttctaggcgcatgcggcagctgcccaagttcaacaattacgctgaaagccggaattgagcgcgctcttctagaagaagtgccgggtgtcgttgaagtagaacaagtcttttaataaagcagccaggctgatatttgatcagcctggctttttttattagagatattggtcaaaccatgagctgatataattcaggcgcttgatccgctgtcttgggtgtccggtgcgtgacaaattgtgcgatgcattcggaaaacggacaagcttggtttccttgcccatttttttcagagcgataaacagctgctccgcctgctcgatcggacatcggtcatcccgctcgccatgcagtatcaaaagcggtgtctccacgtttgctgcgtattttaaaggagaccggtcccagagcttttctgtgtcctcaaacatgtcatgctcaagctgccagtctgtaaagaaatagccgatatcactgacgccgtgaaagctgatccaatttgatatcgagcgctgggtaacggcagctttaaagcggttcgtctgcccgacgatccagttggtcataaaacctccgtagcttccgcccgtgacaccgagccgcttaggatcaatatgcggatctcgtttgatagcctcatccacagcctgcatcacatcgtcataatcctttcccccataatctcctctgaccgcattcacaaattcctgcccgtagccgtggcttcctctcggattgatataaacgaccgcgtatcctttcgccgccagcacctgaaactcatgaaaatatgtatgtccgtacatcatatgcggaccgccgtgtatgttaagaataagtggatatgttgtctcaccttccatttgtgcaggcctcatcagccagccgttcaccatcacgccgtcttctgtagcatattgaatctcttcaggtattgatatcgtatgctccctgacaaacttgtcattcgcgccagtcagctgtttctcttcctgtccaagcgggatactgtaaagctcactcggtctgtccggctttgtcacactggcaataaagtgctgttcatcaggtgaaagagaaaagctattgatgtactctttttccagacgaatcggatacacaaggccttcaatcgaaatataatagatgcccgtactgccttgatctgtgccgatgacataaaacccttggctgtcctttgtccaaatcgggcgctgttcagcaccaccgatcaatgaatctccaatcagcgcatccgctaaatgaacgtccagcatctcagtaagacatgtgaggcggccttgttcgatatcatagagccacgcctttgagagcgtagcattcttatattccttttcatttccaagcaaagcaagataccttccgtctggtgaaaatgagcttgatccgaatgagccgcgatgaggtgtaacctgcttaagatctccagactccagtgacattatgtaaacatcatgcggcttgctggcatcatctgtttcagttaaattagctgagaaaacaagccatttgccgtcaggagaaaaagcaggatcaccatgatcagctttgtgacttgtcagctcttccatctcacccgactttacgctgacaagcacaagctgggcatacgcacctctcgtcagccctttgccgtcccgtttgtaggagaggccttgcacttcaacaggttcatagctgtcctgctctgttttttctcggtcatcaatgttttctccctctcccaaactgacagtgaccagaatcgattcgccatccggggaccatattggctttgacacgccatacgggatatcagtcagttttctcgcttctccgccttcagcgctcatcatatacagctgtgccgcatcgccttctcgatcagaaataaaggcaagcgtgcacccgtccggagaccatcttgggtcggtgcttcgcttttctccatgtgtccaaggaacagacccgcccgttttcgtttcatagatccatatatttgatgtatacgaatctttctcttgattcacttgtgattttacatatgcggcacgggtgccgtctggggcgtattgaggatcggtcacagagacaatcgctgtgatgtcgtctgcggttatcagctttttcatattcatctcctcctttttacatgtatttcgtttttctaaataaaaactcctttatctccagcaaaaaaagcgccctctgctgacgctgaggaacgcttggcatgatctatacactttttacttgatataaaggatttcgctctattatacttccctctttcgggacggtcaaagcgtctacttcacaatgagggaaatgaagcgcgagctgttcttttagctcttctccctttcctttttcggtcatgacgagaatcgtcgggcctgctccgctgagagccgttccatatgcgcccttcatctcggcgacgtgctctacttttgacagctcaggcacaagcatcgcccggtacggctgatggaacatatccttcttcatgattttcccgacaagcggccaatccttggacatgatcgcagcaatgagtatattgctgacagcacttgcttttacggcgtcggcatatggaaactccttcggaagcacgtctctcgcgtctcttgtcagcacttcgtaaaaaggaatgacaacgactacgtcaatgtcagcattcgggacgcggatcatttgggtctcgtcatcctcatgcaggccgatcacaagtccgccgacgagagaagcgccagcattgtccgggtgtccttcttctagactggctaaatgcagcttgtccgcttcagacagctttaagccgcataattcatcagccagttcaatggccgctacaatcgccgcggcgctgctgccaaggccgcgtgcaagcgggatgtcgctccacaccttcacatggacaggaggtatttcttttccgtacaaatctgcggtccgtttagccacttgatagatcaggttatctgtacccgccggaattccggcgactgtttctgtttcagcctcaaaagaccatttgtcgctttcaaagacggtcagcttcaaatatctgctgagcgccattccgactgaatcaaagccggggcctaggttagctgtgcttccgggaacagtgacagagaacagcatgtcggcttcgttcatacacgggccgctccttttacatattcaaggatgctgtcttcatcagtcggcaatgtgacaggcttgatttctgaaatgtcgaccgctgtgttcggatctttcagtccgtttcctgttaacacagctacgaccttgctgcctttcggaatttctccggatttcacctgtttcagcactcctgcgatagacgcgcaagaacccggttctgcaaacacgccttctacacgggcgatcagctgatatgcgtgaaggatttcatcatcagtgacttcgtcaattttcccattggattcctcggctgcctttacagctttgtcccagcttgccgggtttccgatacgaatggctgtcgctattgtttcaggattttcaatcacttcattgcgcacgattgccgccgcaccctcagcttcaaagccacgcattttcggaaggcctgtgccgtttttctcatgatattccttgaagcccttccagtacgcagtgatgtttcccgcgtttccgaccgggatcgctaaaacatcaggcgcttcccccagctgttcgcacacttcgaaggcagcagttttttggccttcaatgcggtaagggttgactgagttgacaagggcaatcggtgatttctcacagatggaacggacaattttaagcgcatcgtcaaagtttccgtcaattgcgataatctcggctccgtacatgacagcttgagcgagttttccaaatgcaatttttccgttcgggatgatgacaatgcatttcatgttagcacgggctgcatatgctgccgcagcagcggaagtgttacctgttgacgcgcacataatcgtgtcattgccttcttcttttgcctttgccacagccataaccattccgcgatctttaaatgatcccgtaggattgacgccttccgttttgacatgaagctcaattccgagctgctcagacagcttcggcaggtgaataagaggtgtgtttccttcatgtaaagttagcgccggtgtttgatctgttacaggtaaaaattctttatattgatggataagtcctttccacattagctccaaccgttcccttctacacgatatgtgcttttgacttcttgaacgacttccaaatcatttaggttttgcaggatatcactgaaatcagcttctgatgtatgatgtgtgacaattacgatttcagctaactcatcatggcctttaattggcagctgaaggattttttcaaagctcacgccccgctctgagaacacagatgtaattttcgagaatgaaccaacctcatcttttacatgaattcttaaaaactgctgtgcataaatgtcagacggcgatttcatgtttttctcatattgcggtccgacaaagctgttgccggttacacctaggcgcatatttttcatgacagcgacgaggtcagaaacaacggatgtcgctgtcggcatgcttccggctcccggcccgtagaacatcgtctcaccgacagcctcgccgtatacataaacagcgttaaactcattatgaacagcagaaagcggatggtggtcaggaagcagtgtcggctgtacgctgacctcgattttgctgccgtcacgctgagcaatcccgatcagcttcattgtatagccgaggcgtttgctgaagctgatgtcctcgtctgtaatttgggagatcccctttactttgacgtcttccagatccacgttcatcgagaagccgaggcgcgccaatatcgccattttccgtgcggcgtcaagcccttccacgtcagaagtcggatcagcttcggcaaaaccgagatcctgcgcttccttgagcacttcctcatatgggcttttctctttgatcatttttgttaagataaagtttgttgtgccgttcacaattcccatcatttttgtaattcgatctgatgagaggccttcctctaatgtgcgcagaatcggaatcccgccggcaacactggcttcaaagtagatatcgcatccattttccttcgcttcagcaagcagctcggagccgtacacagccattaagtccttgtttgctgtgacaacatgctttttcgatctcagcgcgtcgaccaaatattgttttgtctgttcaacgccgccgatcacctcgatgacgacatcaacatctggatcatcaatgacatcatacacttctgtcgtgagcacttccttcggcaaatctacttctctctttttctctatatcttttacaagcactttttttatcgtaaccggacagccgacctgatgcataagcttatcctgatggtcttgaataattttaacgacaccgcttccgacggtacctaaacctaaaagccctacacgaatcgctttcaaaaaaactccacctttcttttgattgtcctcttgaaaaagacaattgttaactcaacacagacatataagttacaaacattatataagcccgctcctgttttgacaagacagcattaggctgaattttgcgaatgtaaacgcttaacgcattgatatgacaagattctttattttctaattatttttgtcagattttctcctcaccctgagctgcctttgccgagccagctgacgcgtggaacaaacagcttctgcgcccgcatattcatgaattcctgcgctgtattgagaaattgttcataacgcccacagtcattaagaatgaagacaagctgttcttcaaaataatgcttttctgattctgatgacatgtaatagctttctacgatttcaaaataatgaagcgggaaaagcagacggctgtataaaaggcgtttcgaaaatgaagacagcggtgtgacttgctcgtattcctgtaaaaagagaaagccctgctgattaaaatcttgtctgtgatgcaaaaacgtatgcctcatatattcagccaaatcacgggaagcgtggtcaaacacccaatccgccggaatcctgatcaatgattccggtgaccatgtatgcctttccatccgctgatggcatatcgttcctgaatcagcggcttggggcttgtcatccagctcagtgtccactaaatattgtatcgcgttttctgacagtcctaaataatagggaaatgattcgatcatttttttatcgaatggctcatgcggaggggtctgaacctttctctgccaaaatgcttccagctgatcaattcgttttccccacagatccttccactggccgattcttccggccgccttcacctcatatggatatcctcggccttttcggtgaaattccgcaagctccgctccaatggagaacgccctgtttgaataagggggggccgccttcagcagagcgtacgtttttccctcatgttcaaatgtcagttcaccttcttttgtaaagataaaaaccgaaacgtatgggtcactttgttcttgtaaatactgactcatgtaataaagctccgccagctctgtttctgagaattgggaaacggggacaatcagaaagtatgaattaggcgtctgaaagcattgatatgtgtgctggtacatggaaagctgcctgatgtgaatgccgtatttttcttttattgtacctttcaccatgatcacctgcctgttgaattagggctcatcacatcgtagtcatacacagccggaattatgaatacatattttaatccgaagaaggcgcaagaaaaagtcgtaaacttctcaagcattttgtataaactagtaaaaaagattgggtgaagctgatgtcagaaaacgaacaattcagtcagatggaagctaaagcaagagcacggatgaaggagcgcggcgttgaggtatcagacattgccgagcttgtcttttttctgcagaaaaaatatcatccggatttaaccattgatgaatgcacgctgaacgtcaatcgtgttctcgcaaaacgcgaggtgcaaaacgcgattttaacgggcattgaattggatgttcttgctgagcagaaaaaactgtctgaaccgctgcaaacgatgctggaaatagatgaaagcctatatggagtagatgaagttctggcattttccattgtgaacatttacggatcgatcgggtttacgaactacggttacatcgacaaagaaaaacccggaatccttaaacgattgaatgataaatcaaccggtgaatgccatacctttttagatgacatcgtcggagcgatttccgccgcggcttcaagcagacttgctcaccgcgcgcggcatacagaataagggcacccttttagggcgccctttattcaaatgtatggaatccattcagtcagagagtcaatggcgtgagtcggtttttccatatcgtctgtcatatgttctcttttcgttacgcctgtgtgaacgagcagcgtatccatacccgcgttaatgccggccataatatcagtggcatagttgtcgccgaccatgagtgtttcagacacatctgtgccgagaacgcgcatcgcctgctccataataattgattccggcttgccgataaatacaggctgtacacctgtagatacggttaacaccgatgtcagtgagccgtttcccggcagaaggcctctttcagtcggaatcgcaatatctccgttagtggaaataaagcgggcgccatttctgattgccaggcagccgacagcaaatttttcgtatgtaatggaacggtcgatgccaacaacgacaaagtccgcgttttctccgccaaatgtcaggccgttttcttcaatcgcctggcggattccttcctccccaatcacatacacagacgcgtcttttttctgctgtgcaatgtgctgggcagttgccatgctggtcgtgaagacctgctcttctgttgccggaatatcaaaagacacgagcttgtccgctacctgcttcggtgtgcgcgaagagttgtttgtcacgaaaagataaggaacgccgcgatctttcagcgttctgacaaattcacacgcctcctcgattttttccgtgccattgtacattgttccgtctaaatcaattaaataccctttatatgttttcatatccaacactcctgtggctttccagttgttatttaaacgcggaaacaggtcctagctctgtttccaaatagcttctgatccgtttcgggaagtcctgaagagctgtttgatgcgccttgatcagcctgtaaagctcgccgctgtcagcgagcagatactgttgaaccaacgttttgcggtaggcgatcaattttttgagctcatcaccctctttttccgtgacaactttctcatcaacaagtatatccataatgtcgtcatagctgcccgggtcccgcataataaagccgtcaatcatgtcattgcctgtatccaaaatgcattcgattaacagatggcctatacgctgaagtgccaattccccgatttcagactgccagtctgtttgtgagtcaaatagcgccagctggtgctcgaagaaccctagtgttttctcgattttgcttctgtcaacaaaatacatgacagcatcccctttgtgtatatttattttctgatccgtttcaagacaaaatacgcacagccgaaattgcagtattcgtaaatatattcatctaatgtgctgattttcgtttcgaaggttgccttttgattctggtcgtcaaagaagcccttgagccttaactgaccgtatccccagtctcccacaatataatcgtatttatttaatatatcggagtagcgggctttaaaagcctcttcgttgaagccgtctttgaaattgtgcaccaattcaaattcggcattttgaataagaatcatgatctcacctctttttcactcattcctatcataattcattgccccgtccccatcaattgctaaagaataaatcatgcgatttggctaccctacacatgaggagggattgataaatgaaacgaaccgctgtcagcctctgcctgctaaccggactattatccgggtgcggaggcgcaggattggataatgcccaaaatgtccggaatcagacgcagaatcaaaccaaacccgttcatgtgtcggaccgcaacgaggcttttaacaggcataatgagaacgaacaatttggctatgtccgctatcaaaaagaacaatttgacggagaccagcagaaaacgccggtgatgaaccgggaagaaaccgctcacatgatatcaagtttaacggttcagcttccccatattcaagatgctgcgacattggtgaatgaccgagaagcgcttgtcgtatacaaaaccgattctaaaaaccgggagctgaccgccgatcaggtgaaaaaaacagcggcttccgtgataccgcgatactatcacgtgtatatttccgataatccaaaccatatgcagtccgtcgaaaattacagcaatctcggctctggttcaagggatattagagagatcatgtcggggacgattcaagaaatgaaaacctccccgcaaggaagccctgtctcagagaatgaaaatgccaatggagaaacgcgtcaggacatgaaaatcgataggaatgacaaaaacgccagatgatctggcgttttggcattatgcttgggcttgacgctttttagatgcttcgtttacttgttcatccgcatggtaagaggaacggacaagcggaccggcttcacaatggctgaagcctttttgcatcgcgatttcttttaattctgcaaattcatcaggatggtagtatttttggactttcaagtgtttcttcgtcggctgcagatattggccgattgccataatatccacgttgttcgccaagaggtcgtccattacttcaataatctcttcttttgtttcgccgagcccgatcatgatacttgattttgtcggaatgtcaggctgcatttccttcgcacggcgcaaaaattccaatgaacggtcgtacgtcgcacgcgcacggactcttggcgtcaggcggcgaaccgtttcgatattgtgattcaggatgtctgggcgtgtatccattaaggtttttaggttatcgtagtttccgcccatatcagacggcagcacctcaattgttgtgaacgggctttttctgcggatcgcacggacagtttccgcgaaaatgcctgcccctccatctttctgatcgtcacgcgcaacagccgtaataaccgcgtgcttcagattcataagcgcgactgaatccgctacgcgttccggctcttgcagatcaagctcagttggaaggcctgttttgacagcacagaaacggcatgctcttgtacaaacagaacctaaaatcataaatgtcgctgtacgtctgaccgcccagcattcatgaatattcggacactttgcttcttcgcatacggtatgcaggttgttttcccgcatgagttttttgagccctgtatagttttcatttgtatttaatttaattttaagccattcgggctttctgaggtgttcgtctttctttgccaattcccatcatctccaatatccaatatactcaatttctgacacgaaacattctgaaaacgagaaaggtgcagattttagttctgcaacaaaaataatgtttttctaactaaagaaagtcttttctttagacactttaacataggaaaaatttctcgacaagggaagatgattactgacatttttaagccgggttgccgcaaactatgtgtattcaatatgaaaggagattattttgtgaaagttttgttatccgctcttcttctccttttgtttgcatttgagccttctgcgtctggaaaaaagctttcagatccagtgctgtcgaaacggatggaattatatcataaaatcgaagctgtgacgcagatcccttggtatgcgctcgcggctgttgatcaatacgaagaaaacgtgcggagcaaccggaaagatctgcctgaaaaggcgggaatcatcagcatctatatacccgatgatatctggagcgggcctgaaaacccgaatccgaaagatgatgcgccgttaagcattaaagtgtttgacggaatcggaatggatggcgatggagacgggaaagccgaggtcagcaacgatgaagatattttgtatacgttcagccaatacctactgtcgtatggcacagatgaagacaacatccggatcgggctttggaattattaccggcgtgatcagacagtggggattatatctgaattcatgaagctgtttaaagcctacggccatattgatctgggcgagcatgcattcccgcttccgatcagaaccgattacagctaccgaagcacgtggggagatgcccgcggcttcggtggaaggcggattcatgaaggtacggatatctttgcccattacggccttcctgtcaaatccacatgttacggcgtagttgaaatgaagggctggaaccgcttcggaggatggagaatcggcatcagggacattaacaatacgtatcattattttgcccatctcaatgggtttgccaaagggattaaaacaggacaaatcgttgagcctggccaagtgatcggatcagtcggcagctccggatacggcccgccgggaaccgccgggaagttcccgccgcatttgcactatggcatgtacaaagataacggaagaaccgaatggtcatttgatccatacccgcatttgagggcgtgggagcgatatgaataccaaaaaaagaagtaacaaaaagccgcctcttcaacaggcggcttatttgctgcttttttctttttttgaatcggcaccgtcttctttgctgctcggaagctggacagaaggcgtgacacccgagccgccgcttccattataaaactgcggcacttcgccctgcactgctttaatcgatacaggaacattatttgtgacgacagcggttttgctggcaaatggaatgatgaccttcactttaatttcgacaaagatgctgatatcaataagtgcgttatttatgccatacggcttgattttggttttgacatctgtaaaagcgtcaccgattaaattgaaccggaccgggattttcggcccgaggtttccaagaaggctgttgccggttacctgtcccagcggaatgttgatcataatgttttcactggcgccgctgtgtccggtatgggtttccatctctttcaaatgagcctgaagctgctttgtcacttttgttttcacactgtttacaacctgtgtattaaaatcgattgtcgttaagtttccgttttcatcagaattcatttgaaacatatctttcatattttcactgtcagacatatagtcctcaatcgaatcctggatcacctctgtcgctatacgcttcgtttccatctcgccgatgtccattaaaacaggtttgatcgagccattgatcatccaaaggctgaccgttgttgacaggataaaaaagacaacggacaggagcatcacgtaacggaaaggcaaaggtcctctcttgcgaaaagggccgcgatatcttggcaagaaaatccccccttacatatcacaatgtatgcttgtaagaggggacatagtaatagccggggccaatttattttatttcatcatttttaaaagcgcttctctgccgctcatgccgactttgatgccaagatcttccgcagcgtacgtgacggattctaaaggtgcgtctaacagctggtcaatggtgcggacaccaactgcgcgtcccgccacgatgccgcgctcctttaatttttcattcagcagcgccacatcaagcgcgccgcacataatgtatccgtgatcattggcgacggccataaaattcgttttgggaagctttactgtcacagctgtaaaaggctgtccttctatcatgatcggtgtcaggtttaccacgtcaaccactcccttcattcatcactttatgatgaagggcacagcttgttgtgggctgactgccttattgtgcaagcttccaagcaagcagatcccgcaaaaattccggcataaaatattctttttctgcagcgtcgcgaatcaacggaaacagtttgccgagcgtaaacatatcaagcaccgcaacggagtattgtttatgtttttcaatatcttccccgttcagtgtgatccgagtgacgtgggtgatcccgtcatcgagccgtttcgtttctacctcaacgccggcatacaccattttccccatcacttctccgcggaagccgagtcctttgatccggagctgctccatttgttcggaagcggcatggacaatggtttccttcagttcttctcccgtcaggcggacagccaccgggttgatcggatgcggacagatgcggtgcagatccagctttgtcacaggacctgcttttagcggaccgagaatgacacctgaattgaccatactaatgtccgtctcgcaccattcctttaaggcgtatgctaaaagcaaaggcagctctgattcttcaaaccacttcacctcagcatcttgtgcaagctctgcaacggcatcggacagtttctcctcggcttcacgttctttttcattgagaaacgcttttgtttctgcggattctcctgtccattccgccatgttctgcacagaagccgttttgctaatgatgcttcgctgtacgctgtccaccgtgatttctacacagccgacataatggccgtatttctcggcgctggccagcagtaccccattaaccacttgtccatcttcaagcaaatgatgggtatgtgattcgaggattacatcaatctcaggcaccgcttcagccactgcttgatcatcaagaatgcctaaatgtgacagcagaacgataatatcagcctgccctttcacttccagaatggtttcctttatgctttcaagggcatccgtaactgtccatcccagcttgtcatatacaggataatacggcacagttacacctaagaaagcaatggacataccgtttttcaatgatttgatatggtaaggcaccgcccaggacggacggtttccatttttatcaaacaggttagagacgatgacaggaaattcagcatgatcatataagacagcaagctcttcatgcggaagcgtaatcccttcgttattgccgatcgccgctccatcaatgtgaaggcggtttaagagatcgacattcgcttttccgaatgtcgcctctgtcacgaattgaaaacgatcaagatgatcgccaatatcaaaaacgagcgtctcttcgccgtctgactgatgctcttttcttttctgctcgatataatctacaattttcggccagttttcaaaatggctgtgcaaatcatttgtatgatataagcggagcttctccttcataatatctctccctaatcgttcagctgaaaatgccttcataaatgagctggcagccgatcaaaatcaatacgatccgcatgatcataacgatcgttttcgtctgcatttttctgttgatggcggcgccaagctttccgccgaaccaagcgccgggcacaagcgcgagggcgtacagccaattgacgtgcccggaaatcatatgtgaaacagaccctgtcatagaagacaggaaaataataaacatggacgttgccaccgcaaccttcggcggaaacagaaataacagcatcatcgccggaaccatcagtgatccgccgcctataccgaaaagtccgcctaaaaaaccgacaacaaaggcaatggcaataccgacagaggcctgatatgagtacgtataaggctcaccggcatcatcctgaaatgtccggataattcctttgtgcgctttgttgattggccgggctttcgctttcagcattaaggataatgaaatcagaatcataaaaatgccaaaccaaacggaaaacgagtttgaattgaacagctttgacacgtaagccccgatcatgctgccgggacccgaaccgataaagaaaatgagcccgctcttataatcaactgttttatatttaatataagccaaagttgaagaaaggcccgtaaaaataatgaccaaaagcgaagttccaatcgcaacctgcggcgtcacatcctgaaacagctgcgtcactgtgcttaaaaacatcagagatggcacaatgacaattccgccgccaagcccgatcagacttcctaccgtacctgcgattaatcccaggacgaccaaaatcacaaacgacatcaatcaaaacctcttttctaaaataaatcgagctgtctcggagcaagtccgctgtactcgatatcaagcagttcaagcatctgcttgccattatccgcagcgtcaccgccggaattgttgttgaacaggacaaaaacatccttacattgctgctgcaatttattcaggtgctttttccaatcctccagctcctgttggttgtagcggtataagtacctgacctcccgccagtttttcccgccatcaggcttcatccagccctgcttgttgcgtccgtgaaacctgacgagcgttttgttttcatcggtcgcgcgcaacacggtcggaacgctgccttctccgatttgcggttcatcacagacactgtgaatccagccttccgctttcataaatgaaagcgtctgctcataaaatggcggcgagaaccaggaacggtttctgaattcaagcgcgcaaggaatatctcccatttggtgcttgcaccatctcaaataggcgacattctccttcttgcagtcaaaccacggcggaaattgaaacagcaccatggcgagcttattgctatgtaaatatggcgttaaagacaccttaaacgcatcaaacatctcctcttttgagtcaaagggaatttcgccgcgctgatgccctgtcatgccctgatatgctttcacgataaattggaaggtttcgggcgtttccttcacccacttttcattattgcgcgccggctgaatcgcgtaaaagctcgcgtctaattccacgatcggaaaatgggaggaataggcctgcaattttttctggctggccgttttcggcggatagatgctgtcatgatccccccaccccgtcagtccgatataaatcacactcattcacctctcttccagtttatcacacgtgttttcaggtttcctcggaaatgctgttcatatggcgggaaaatgcagaacgaagatgctgatattgttcctcattcgtatctaaaaacgcctcttctcttgaggaaggaatatgctgatattcaataggcgcctgaaactgctcactcgtaaaatcgtacatcacaccattgatgctgttgtaaaaatgccagctctcaccgacttttgttttgaaaatcgtgccgccgaaatggtcttgaatcaccaatgccgtcacgccgcattggccgcatgacgggcattcttccgtccatttagagctcgaatggcgcgaccaggattgcttaagtatgtatttgacatgctccattgcctccgcctcctttaaaaaaagataccacgttgatgagattttaaaaactagaacggaggaaatcaaaaaacccggcggtaaaatccgccgggcttacgaaggaacgaccagagctccgtcaatttcagtgaccttttccccatcattgtacacgcatcggcctttgctgtaagtggcccaaatgctgcagggaaatgtatgtccttcgtaaatgctttttttatgctttgcaaacatcgattctcttgtaacagtgtacggctccatgctgacgagcacgaaatctgcatcacaccccgcctcaagccgcccttttttctgaaggccgaatcgttttgcaggggccgccgctgtccattctgcgatggtttcaaacggaatctgatgctcaagcgccagttccagcattcctaataaagtgaactgcccgccgctgattccgccccatgataaaaacatgttatcctcccgcttcaaggatggacggcagggggaatggtctgaggaaaccatgtcaatgtccccggcaatgagcgtctcgatcagcgtctcttttgattgcagcgaccggagcggaggcgcgcattttgcgacagagcccctttgccgtaaatcgtcatggctgaacaagacataatgcgggcatgtttcaaccgaaacatcaagaccttcctgtttcgcctctctgatcagccggaccgctttcgccgtgctgatatggacaaaatgaaccggacaacctgtcaccttcgcatactgaatcgtgcgatacaccgcttcaacttctgcttcctccgggcgggaggcggcgtacgcatccgcgtccacctttcctttattggccaaaaccatctgcaagtagcttgtaatcgcgtcactttccgcgtggagagcgaggatttttcctgcagccgcgatttctgccatgcctttgagcaatgtccgttcatcaacagagcggaactcatcagtgcctgactttgataaaaacgctttaaacccgatcgctcccgcttcagccatcggacggatgtcctcgatatggcctggcacaaggccgccccatagcgcaaaatccacggcagatttttgcctgcctagctcagcttttgcgagaagatgctctgccgtcacggttgatggaatacagttgagcggcatatcaaaataggtggtgcaaccgcctgcggccatcatttgagaacctgtttcaaacccctcccaatcctccctgcccggttcattaaaatgaacatggcaatctatcacaccaggaaacacgtatttcccgtctgcctggatgatttccgtcccgcttgcttcaatgtcagaacctatctcggcaatgacaccgttttgaactgcaatatcagcttctataacgccatctggcgtaactgccttcgcaccttttatcaccatatcgtaagccatattgatccccccatgtaaggatgacgatttttcatgtcagtttatgtaacacaaccagttctattttcaacagtttactgctactatgatcgtattacatcagcaaaaccgctagaattcctattgaaaattattcaccttaaccaatgtttttatagaaaaggagaatgcgctatgaatatttttgatgtgatgaaaataccggcttttaaaaacgccaatttaatcgctggaaaagcaggaggggaaagagaggttcagcatgtcaatatgatggacgctccggatatcgcagactttttgcataagaatgaattgctcgtcaccaccgcctatcacctgaaggatcacccgcatcaattatctgaactgattcggcaaatggcaaaacgcggctgcgcgggcctcggcattaaaacaaagcgctatctggaagatatcccgaaggaaatcatcgaactggccgattcatatgcgtttccgatcattgagcttccggaacacatccgactcggcgatattgtgaatgccacactcagccatattctcgatatgcgttctaacgagctgcagcaagctatttacgcgcacaaaaaattcacaaaccacattatgagcggcaaggggctgcaatccctcctcaaaaaggtgtcagacctccttcagcttcccgtgctgctgcttgaccagcatgccaaaatgctgtctgcgtctcatcagatttcagttgagaccgaaaagctgaaaggcaccctgaataccgtatccgggccatttttcacttgtttctctacaatctcagatcagaaaacatattctgtcctgcctatttataatcacgaaaaaaactgcggctacctgctgataccggacatggtgcaggcaggcgacaaaggattgatcctcacgattgaacaagcggccaacgtcatttcctttgaactgctgaaggaaaatgcgctgaagcagttcagccggcgggcccgcaatgagtttttcaacaattttattgagcggaccttttcttcagatgacgaaatcaaaaaccgggcgaaagaattcaagctgcgctgggatcaaaaatacatgtgcatcgccggcaaactcgatcgcaatgacgaatcaatcagctttacagaaaatcagctcgcttccgacagcgtattcgaatttcttgaaggtgaattatcagccttcccgtttccgcctcacttctttatgaaaggaaacgtcggcattattctaatcgaagcgacagacagctggagtgaaatgcacgcctcggtgatcagctttttagaacagttccaaacacaggtcagcgctcaatttaaacgaaccgtgtcctttggcatcagcaatatctgccaaaagctcattgatgttcccgacgctttcacagaagcttctgatgctctgcaatcggggcatttgtcgagaagcaccgcatttatccaggtgtatcacgccaaagatgtgcctgagcttctgcgcttgctcccggttgaggatttgaagaaattttacaactccacgcttcagagcctcgctgaaaaacagcaggaggatcaaagcctgcttcatacgctttccgtctatttagagacacactgccaaatttcagagacggcaaagcgtctgtacgttcatcgcaatacggtcatataccgccttgaaaaatgcgaagagcttctgggtaaaagcttaaaagatcctgaaacaacgatgcgtttgcggcttgccttacgtatgcagcggctgatcagctaatgctcgttacattttcttacaaaacgaatcatttttcgtcactttcagcaatcacacctgtctttttcagctactgtatccaatgacacccctcgatcggcacgatatcatgttactaaagttcacatacagggagggactatagtgaaaaaaagatcgtttaaggtgtttacacttagcctgcagcatgtgctcgccatgtatgcaggtgcgattttggtgcccctgcttgtcggcagggcgctgaatgtaacaactgaacagctgtcctacctattggcgattgacctgttaacatgcggcgtcgctacgcttttgcaaaccttgcgcggaacatacatcggcatcgggcttcccgtcatgcttggcagttcatttgtggccgtcaccccaatgattgcaatcggcagcaattacggcattcacgcgatttatggttccatcattgcggccggtgtgttcatctttttgtttgcgcgttttttcggcaagctgactgtgttatttcctcctgtcgtaacaggtaccgttgtgaccttgatcggcctttcacttgttccgacaggtgtgaaaaatatggctggcggcgaaaaaataaacggcagcgccaaccccgaatacggttcgctcgaaaaccttcttctctctgtcagtgtccttgttctgatcttagtcctcaaccgctttctcaaaggatttgcccgaacactgtccgttctgatcggcatcgccgccggaacagcggcagcagcgatcatgggcaaagtcagcttttcttctgttacagaagcaccgttcttccaaatcccgaagcctttttacttcggagcccctgcgtttgaaatcggtccgatcttaacgatgctgatcgtcggaatcgtcattattgtggaatcaaccggcgttttttacgcaatcggaaagatatgcggcagacctttaactgaaaaagatctcgtcaaaggctatcgagcggaaggaatcgccattctcatcggcgggctgttcaatgcctttccttataatacctttgcgcaaaacgccggcttattgcagctgaccaaagtgaaaacaagaaacatcgtcgttaccgcaggctgtatccttgtctgtctcggactgattccgaagattgccgcccttgcatctgccgttcctgctgctgtacttggcggcgcgaccgtcgtcatgttcggcatggtgattgcctccggcgtcaaaatgctcagcacagcggatctcaaaaatcaataccacctcctgaccatcgcatgctcaatcgcactcggcatcggcgccagcacggcccccgggatttttgctgaattccccgctccgattagaattctggtcagtgacggcaccatcactggcagcctgaccgccatctttttgaatctatttttcagcttgcgcgacaaaaaagaattaacagcacagcaaacagaacttccagtattagaacatacactcgcattagaaaaagaggtgtaaaaaagatgaaggaacagcacaatgccttacagctaatgatgctggggcttcagcacatgcttgccatgtatgcgggagccattctcgttccgttgatcgtcggagcagcgatcgggctgaatgcggggcagctgacgtatttaatcgcgattgatttgtttatgtgcggggcggcaactcttttgcagctctggagaaaccgatatttcggcatcggccttcccgttgtgctcggatgcacgtttaccgcagtcggcccgatgatttccatcggaagcacttacggtgtcccatcgatatatggtgccattatcgccgcaggactgattgtcgtcttagccgcgggcttcttcgggaagcttgtccgtttttttccgcctgtcgtaaccggatcagtcgtcatgatcatcggcatcagcctgattccaacggcaatgaataacctggccggaggtgaaggaagcaaagaattcggctcactcgacaacgtgctactcgggtttggcgtcacagcttttatcttattgctgttttatttctttaaaggctttatccgctccatagcgattttactcggtcttatcgcaggaacagcggctgcatatttcatgggaaaggtcgatttttctgaggttttggaggcgtcttggcttcatgttccgtctctgttttatttcggaccgccaacctttgagctgccggctgttgtcacgatgcttctcgttgcgattgtcagcctcgttgaatcgacaggcgtttattttgcgcttgcggatatcacaaaccgcagactgtcggagaaggatctggaaaagggctaccgggcagaaggccttgcgattttgctgggcggcttatttaacgcgtttccctatacagctttctcgcagaatgtcggcatcgttcagctctcaaagatgaaaagtgtcaacgtcatcgccatcacaggaatcatactggtcgcgatcgggctggttccaaaagcagcggccctgacaacagtgatccccaccccagttctcggcggcgcaatgatcgtcatgttcggcatggtcatttcttacgggatcaaaatgctatccagcgttgaccttgattcgcaaggcaacttgctgattatcgcctcttccgtcagcttggggcttggcgctacaacagttcccgcgttgttttcatctcttccgggcgcggcctctgtcttggcaggaagcggaattgtgatcggcagtttgacggccattgcactgcacgctttttttcaaaccaaacagccgaatggcacagacataaaaacgtaaaggaagatgccaatgttcacaatggatgacctgaaccaaatggatacacaaacactgacagacacacttggctctatttttgaacactcttcatggattgcggagagatccgcagcactacggccgttttcgtccctttctgatcttcaccgcaaaatgactggcattgtaaaagctgcggatcgcgagacacagcttgatttaatcaaaaagcatccccggctcggaacaaagaaaacaatgagcgatgactcggtacgagagcagcagaacgcagggctcggcaaattagaacagcaggaatacgaggagtttctcatgctgaatgaacactattatgatcgcttcggctttccttttattttagcggtgaagggaaagacgaaacaggacattcaccaagccctgctggcaaggcttgagagcgaacgagaaacggagttccagcaggcccttatagaaatttaccgaatcgcccgctttcgtctggctgacatcatcactgaaaaaggagagacgcaaatgaaaagaaccatgtcttatggcaaaggaaatgtatttgcataccgaacgtttttaaaaccgctcactggagtgaagcaaatcccagaatcatcttttgccgggagaagcaattccgttgtcggcgttgatgtgacatgcgaaattggcggagaagccttcctgccatcatttacagacggagacaatactctcgtcgtggcaacggattcaatgaaaaactttatccagcgccatctcgcatcctatgaaggaacgacaaccgaggggttcctacactatgtagctcaccgatttttagatacctattctcatatggacaagatcactctgactggtgaagacattccgtttgaagcaatgcctgcatatgaggagaaagagctcagcacaagccacctcgtcttcagaagatcgcgtaatgaacgaagccgctctgtgctgaaagcagaacgaagcgggaataccataacgattacagagcaatacagcgaaatcatggatcttcagctcgtcaaggtgagcggcaactccttcgtcggcttcatccgggacgaatatacgactctcccggaagacggcaaccgcccgctgtttgtctatttaaacatcagctggcaatatgaaaatacaaatgactcatacgcttctgatccagcacgctacgttgcggctgaacaagtccgcgacttggcgagcaccgtttttcacgagctcgaaaccccttcaatccaaaacctaatctatcatatcggctgcagaatattagcgaggttcccgcagctcactgatgtcagcttccaatctcaaaatcacacgtgggatacggttgtcgaagaaatcccgggctcaaaaggaaaagtctacaccgaaccgcgcccgccatacggtttccaacattttaccgtgacaagagaagacgccgagaaagaaaaacagaaagccgctgaaaaatgtcggagcctgaaagcctgatgggaaaactgacaacccatattttagatttaaccagcggcaaaccagcggcgaacgtaaaaattgaattgaagcggctgggcgaaagtattttgaaagaggtttacactaacaatgacggcagagtcaatgtccctctgctggctggtgaagagctggtttccggagagtatgtgatggaatttcatgcaggagactattttgcgaataaaaacgtgaatacggtcgaccagccgtttttaaccatagtcaccgtccgttttcagctagcagatccagatgcacattatcatatcccgctcttgctgtcgccgtttggttatcaggtgtatagggggagttaagaaggaagcccgcctcaccggcgggcttctatttgcacttcaataaacttttgatcctaggacagtacttgaagtgatccccacacttagtgaaacaacagctagaataaacattcacctatatttttcaggataattgcctacgagaaaaatatcctgtagtcctttcatttataaatcgaggtttcaaactaataagtcagctcttagcagccgagctcccttctccaatcctataaacagaccgcgttttttctcgaaaaaatactctgaagacaattgctgcgtttttaatagttttgataacgcgttctctcttacacctttagacaaaatattcattttttcttttttagacttaaatctatgtcgaaaatgatcgttggcatatcttatactatctccactaaaggaggtgacattatgggattctacaattctggtggatacagtggaaactctggttactcaaacggtttcgggagctccttcgctttgatcgtggtgctattcattttgttgatcattgttggagcagctatctttaattattaagtttaactttccttgcctccgccgtatccaacacctccctgtccgacagacgccataagaagtttttatggcgtctttgctatgtgttcactaatctttttctaatcagctttcaagttctacgagatttatcgtgtgttttcccacaacgcttctgcgtcttgatcgcgctgtctgactgaggctaaaaaagtccggcttttaaaagccggactcccgtctacccccgttcaactctcttctaatcctgcaagctgaccgcataatcccgccgtacccggtacaccggcacaaattccccgccagcccttcttctatatcttcgtcagaaggttgaggggtttcccgaaacagtgctttaagcgcaattatcattcctggggtacagtagccgcattggaagcctccttcttccagaaaagcggtttggcagatatccagttcctcttgttgtacgccctcgattgttgtaatggaatggccgtccacttgataagccatggtcatacacgcattggccagctttccgtcgattaaaatagagcaggctccgcagcggccgattccgcaggacacctttgtcccggtcagctgaaattcctttctaagcaggtcactcagatgtgtcgtaggaacggcagcaacctcccactcctgcccattcacggtcatccggaactgttccttttttacaggaaatggcccggcctcttttacgtccattgcttcagcccctttctgtctatcgcttcaagcagctcttctcttgaaatcggcagcttgtttatccagcatccgaccgcatcatgtactgcctttacaatcgccggagtgatggcgattgttccgatttcgccaacaccgcgcggtccatatacgtctcccttcattaagtcttctattgcaatcaccttcatgtcaggaacatctttgattccgggaatcaaatagtgatcgagattttccgcagcataacggccatccgtcattttcgcttcctccatcagtgtgtagccgagtgccatggcagcgccgccttcaatttgacctcgatatccctgcggactgatgaccggacctgccgcaatagcgtgctcacaatctatcaatttgacatcgcctgttaacagatctacctccacctcaacggcagccgctccaaatgagtagaggaaatggccgcccaccacaggatcaggcgttgttggaaagtcaaatgccgtttcctctgccaaagggcctttttcagccagctccttatacgtcaccacgagcgcctttgtgtttttgtcacgcaagcctgcagcgccgggaataagattttccgctgaacagccgctccattctgccgcccgttttttcaactgagctagaaacggcttcttcaaacgctggatcgcgtgccacaccatgcttgtgccgcgggatgctgtggaggagcctgacttcggcacttttgcggtatccccaataacaatggaaatatcctctgcggcacaacctaactcctccatgacaatctgttcaatcgctgctagaatcccctgtccgcattcttcaaatccaaacgaagcagtgattttgccttcactcgaaagagacaaacggcctcctgccgcatccattcggccataccccagcccgccgccgtgcattgtaattgccgctcccgtgcctctttgcagatacccgcagttccggctgcttcttgtaagaatgggagatttagatatggcattcaacacctgtgccgctccgtcagtcggtgcaatccgatgctcaagaggccccaagtcatgcggttttctgatattttttcttctcagctccagcgggtcgatgccgagcatgccgctgagacgatcgagatgggtttcgagtgcaaatgtgatttggttgccgccaaagccccgaaattcccccgccaccccgttgttcgtaaatactgatattccttcagtccggatattcggaatacggtacggccccgcggcatgctcgacagaaaaatctagaacggcaggcccaagcgtggcgtaagcgcctgtgtccgccacaattttcacgtcgtgcgccaatagatttcccgaatgatctgcacccgtttttatcgtaatcttcatcggatggcgcttaatgccagaacgtacagattcctttcgtgtctgatggattttgacagggcgtccgcttttcagggccaaaagcgcagcatacggctgaatattcagctcatccttccctccgaacgagccgcccatcggacttgacacaattctgatcttctcttcaggaatatcaaaaatacgggcaagctggaaacggtctttatagccgtgctgggttcctgcatacatcgtaaaacccccgtcgtcttccggaacggctacgcctccctccgtttccatatacgtatgcatctgccgcggcagctcataggtttcttcaaggactgtgtcagatgcttgaaacccttcttccacatcgccgtttgaaaaaaatgcgcggtggaggatattcccgtcctcatgcagtctttgcgcattcggccgaagcgctttttctggtgaatccatgacttccagctctttatactcaactcgaatcagctccagcgccgcttccgcgatttcttctgtttccgcagcaactgcggcgatcgcatccccgacataccgcaccctgtcctcacataaaaccggctgatcagggatgacaatgccaaatcggtttaagccgggaacgtctttatgtgtgacgacggcctgcacgccttccattttctcagcttttatggtgcaaaccgacacaatctctgcatgaggataagcacttctcagcaccttgccatacagcattcccggaaagctgagatcggtcatatatttcaattcccctgtgaccttatcccttccatccggcctgactcttgacggtttgttgatgatcatttattcccctccctcagccatcagctctgccatgatgacgttggcagcggctttttttctgtatgccgctgacataaaagcatctgaggaaaacggcagctcatggataagtgttttgtacagctcatgcgagtcccaccctggtgccatccatttcgcttcgctgtccaataatctcctaggagtgatatcggcatggccagcggcgaggcgaatgccgccgtctttcaaaaaacgtccagctgcaacagcaaccgctcctgtaaaagcctgacgccttccaagcttgtgataaaatacacgctctccctccgcccgcgggatgatgacacgcgtgacgatagccgttctaaagtcttcctcaatgagccaagcgccaagcggcagcctgattagcttcttttgatatacgataagatcagcatcaagcacaagcagaagcggaatgaaatcaccgattttactcgctatgttgccgccaatcgtggcacggctgcggattcccggtgcggcgacagcggaagcagcgtcactgaaacagccaagcgtgctcttgatcaaagggttctttctgcattcactcagtgatgtgagcgccccgatcgacacgtgggtgtcactggcgctgatccctcgcatctcgtcaatcccttcaaggctgacaaggtgctgtttcggtagagttcctttgtcccactgaagctgaagcagcgtgcttcccgatgcggcacacacatccggagcaagcttctctaaaagcgaataggcctcatcaagcgctgccggcctccataattgaatattcatccttgcttttgtcacttggccgttcaagccatcgccctccttaccatgtcatattcctcgggtgtatcaatatcgtccaactcgccgctatcctttgcctccaaaaccgctcctgctccaagctgtccgcttttcaggagcctgcgagccccttcatctcccgttaacccctttacataaggaaaacaagccgacgagaagtagattggcggggtgaacgcccctaaaaacgatgacacggcaaatggctcaggggccagtgccacaagggcattgagatgatcgacggaaagctgaggctggtcggctaacaaaatgacaacgccgtccgcccccatgctttctgcttttctcaccccgctgctgactgaatgcccctgacccttttctgcgtcttggcaaacgtgcaggctccagcgtttttgaaaaggcggagcgtgatacggcgctcctatccactcaagggaggcatgttctgtccgctcgacgaccagcacgtgatcaaggcgggacgacagagcagttttcaaggaaagtgagccgatgttttctccttttagcggcaaagccagcttgttttgacccattcttctgcttttgccggcagcgagaaacacgccgatcagataggggcttctcatacaaccgctattcgttttcttgtttgaatgatttctgcaactacacttaccgcaatttcctctggaccttccgcaccgattttcagcccgaccggactgtaaaagtgagacggaggatgttttccgttcagcagccgtttcgtgcggtttgccgaacccaacagtccaatataatggaggttttgagaaaataagaagttgatgatcgtttgatcgtgctgataatgatgggttgccacaacagctgcatcatgcggaaaaaattgaaatttgctaagcattcgttccggaaaagcggtgatcagctgatccgcttttggaaaaagagaggatgtacaataagcgggccgccaatccgtcacgataacagaaaaccctgtgtcagccgccaaattggccagcggtacagtatccggtcccgccccaaacagaatgaggcgcggcttcggttcaattcgctgaataaacatgttagtgggtggatcgaaatgcggtaaatgaagcgttgaaacagtacgttgaatatcttgcagaggcgcgtccggccagttgccaaaatgcccgttctccgtcagaaataaataatgggaggattcaatctttataacagaagtgacagctttgcctgaatgaaggcaatccctcactttctcatagtgccgccttttttcctgagtgattcgctctgcatgaacatgaataatgccattgcacccggctcccatgccccaagaaagatcgtcctccgaccgcatgtcgtagggaatcagcgttgatgtgagctgatcgcccagcgcactgattctttggaatacatcttcttccacacacccgccgctcagcaagccaatccgtctgccttttttcttaaagagcatagaggcgcctgcttttcgatacgcggagccttcaacttgaacaattgtcgccagtacagcctcctcctggtcttccaggagcgcatctaacatcgtgtgaaaattccccaatgccgcatcctcctctcgaaaattgccgtgagaaacaactagttcagcgtgattttataggtaacttgtataaagaatagacgatggaagaaaaaatgactcatgatttgtcagaaaatgaaacacatagaaagaggatttgtaaaaagagtcaaacgaagaaaatcagattggagaaaacacgaaatcatatctaaaaagcttgcggagttccgcaagcttttctttacaccgctgcctggcggccagcgttttcatacacatccagcgctgcttggagcgcttttcctgcttcgattcctgcgttatgtctgagaagcacagcctctaacccggcaagcacgaatagcacgttttcttttctgcagctgtaccccatcgtgccgattctccagatcttccctgcgagcgggccgaatgagctggcgatttcaataccgaattgtgccagcagcatgccacggacagactcgccgtcaatgccgccgggaatttcgacacaggtgacaacaggcattttgcagctgtcatctccaaacaatcttagccccattgcctttatccctgctgctaatgcggcttcatggtgccgatgccgctcaaaacgcgcctcaaggccttcttcaagcaccagtctgactccctcacgtaaggcgtacagcatcgtcgtcgcttctgtatgatgattgagccgtctttcgctccaataatcctcaagctggctcaaatcaaagtagttgcttgtgattggccgatttcccgaaagcgcttccctgtcagcttgtgacgcaatcccccgctccacctttttacgagctgcaatcacgtccgccacccgctcattatatgtaatcggcgccattcctgagggcacagacaaacacttttgcgttccgccgatggcagcatcaatcttccattcatcgactttaacctcgcagcccccaatcgttgcgactgcatcgacgataaacaatgcatcctcggtgcggcaggcttcgccgatggctttcagcgggtgaatccgtcctgtcgatgtttctccatgcaccatggccacaattttcggcttcactttttttatctcccgtatgatgtcctccgggtcaaaaaccgttccccattcgcactcaagcatatgaacatttgccccatatcgctcggcgatttcagtcagcaaataaccgaaacggccgtaaatgggaatgagcacatcatcttccggctctatgacactagccagcactgcttcaattcccgcccgtgaagtgccgtcaatcgggtatgcccagcggttttttgtttggaacagctcccgaagcatctccatcgtttcattcataatacctgtaaacgccggatcaaattggccgacaaccggggtgctcattactcttaatacacgcggatcaacctcaacaggccccggcgtcataatcgttcttaacggggtgcataattctcttctgcctgacacagccattcctcctttatcagtaagccagtttgtataataaatcagtcagtgcgcggacgccgatctcaagctgtctggctgacgtatattccttcggtgagtggctgacgccgcctcggctcggcacaaacagcatacaagcaggatagcgccttccgatcatttgcgcgtcatgccctgctccgctcaccatttcctcacagctgaagtcgttttctaatgctgtttcaaaagccgcagccttcagcctttcgtccatcggcacaggctctatccgcatatattcatcaatcacagcgcgaattcctttttgtaggcaaatgccgttgatcaaagcaatcatgtcttgatgaaactgttccagcacatgctgatgctgatggcgaatatcgattgaaaactggacgcggcccggtatgacattggctacattgggctctgccgttatttttccgcatgtcagacggagctcatccggcagctcctccgaccgcagtaacagctcatgaatgatacggctgctggctgcgagcgggtccttgcgccatttcatggaggtggttcccgcatgattgcattcaccctccagcgtgacgagatagcgcctctgccccgcaatgcttttcacaatcccgagatcccgtcctgacatttccaatgtctgtccctgttcaatatggagctcaacaaaagcgctgatatctgtccgatatgctgcctgaaacacacctttgccaaaaccgttctcatgcatcgcatgttgcagcgagactcctgattcgtctcttggctctgctccatcctgtaatgaaaaaacacccgtcatattccctgatccccaataggtcattggaaaacggctgccctcctcctcacataaggataccgcttcgagtgtttttttcggcgctccatatgtctctttgagccgctttatcgcaagcattgctgccagaacaccataggcgccgtcgtattttcccccattgatgacagtatcgatatgtgaaccggttataatgacttcatccggagactgggtgcccgaaagccttccaaacaaattgccgacatcgtcgaatcttgtgtcaagcccgaaagaagacatttccgttttcacagcaagctgtgcgtccatccactcttttgtgtataaaagcctcgttacgccgccatccgcagacgcaccgtattgggcgagccattcaatataatctgtgatgctgttttttactgaaagcttctgcttttccatgtactcccccctctggccgctatggtgacttcattatagaaggaggaacatgatagttcattgacagattaaccaaaaaaacgtttattttttagtcacagtatctatccagcaaccagattcaccctacatgtcacaactattttgatgtaaaggtcaaaaggaaacacggtaaggaagagagccagcaagagcgaaagagagggtcaagctcagcttgccagagaggcgatgtttgcggaacggatgaaaacggaaatgccggcagctcgcaaaaacaggacctaaagatatgggaacaggagatttccgcctcctccaaagggactaatttacaattttaatgaaaaatatacaaaatgacacttctatcctttatttcaattttagataatagacatgatctgataaaaggagggcaagtgatgacaaaaaaatcatggtttctgccgctcgtctgtgtattactgatttccggatggcttgcgccggcagcttcagcaagcgcgcaaaccgaattaagcctcaatgaccgattggcgtcttcccctgcaggaacaggaagccttctctcattagccgcccccgctgcaccctatgctgacacagatacctattatgaaggggctgaaggtaaaacaggagactcgctaaaaagcaccctgcaccgtattattagcggacacacgatgctatcctacagcgaagtgtggaacgcgctgaaagaaacggatgaagatccgagaaatccgaataacgtcatcctgctctatacgaatgaatcgcggtccaaaaacctgaacggcggcaatgtcggcgattggaaccgcgagcatgtctgggcgaaatcccatggcgattttggtacgagcaagggacctggtactgatattcatcatttgcgcccggctgatgttcaagttaacagcgcaagaggaaatatggattttgacaatggcggcactgaatatgcgaaggcacccggaaattattatgacggcgattcatgggagccccgcgatgatgtgaaaggcgatgttgcccgcatgctgttttacatggctgtccgttacgagggtgatgacggctatcctgatcttgagcttaatgataagacaggcaacggctcagctccttatcatggcaaacaatctgtcctgctcgaatggaataagcaggatccggttgacgaccgcgagcggaaaagaaatgaaatcatttatgaaaaatatcagcacaaccgcaatccatttatcgaccaccctgaatgggcggatgagatttggccgtaagaaaaaggtgctccttttgaggagcacctttttctaatacacagcctcttccgtttccgcatcgaaaaagacgacgtggtccattttcactgagagctggattgaatcgcctgcatcgattcgcgtgtttccgtccaggcggaccttgagccgctcgtccccagccatgacatgtactatgagctccgagcccagattttcattcacttccacgttcgcttgaaacactgaatcaaacaactggtcatttcctgtcatttgtgtgatgtgctccggccgtacaccggcaatcatctgttctccggcatatcccttttccttcagccgctttgctttttcttcaggaatatgaagccggatcgaagaatttgtgaaaaacagctcgccatgctgctgttctatgatgcctttcaaaaagttcattccgggagagccaatgaagcctgcgacaaacaaattggccgggtaatgataaatgtcatgaggtttcgccacttgctgaatttccccttcattcatgacgacaatccgatctcccattgtcattgcttcggtctggtcatgcgtgacataaatgatcgttgcctctaatcgctggtgcagcttgctgatttctgtccgcatcgtcactcttagttttgcatccagattagaaagcggctcgtccattaaaaagaccttcggctccctcacaatcgacctgccaagcgccaccctttgccgctgcccgccggagagcgccttcggttttctcttcagcaaatgttcaatttctaaaattctggctgccgcatgaacccgctcggcaatttcctgtttcgccatctttctgagctttaatccaaacgccatattatcaaaaaccgtcatatgcggataaagcgcatagttttggaataccatcgcaatatcacgttctttcggcggaagatcattgacccgctccccatcaataagaagatttccttcagaaatgctttctaatccagccaccatccgcagcgttgttgattttccgcatcctgacggccccaccagcaccaaaagctccttatcctttacatctaaatcaaagtccttcacggttaattgtgagtgatatgattttttgacgtgttcaaatgttaatgaagccatcagaaaagtccccctatcttttgacccgttatttcgtcactggaaacaacttggtctttctgttatttttagagtaatcgattcccatttttgctatatttctaaaataaaaaatgtaaatttgtattataacgtcataatacattataatataaataataggttaaaaggaggctaccctttgttaaacaacggaagttctacacctttatacattcagctaaaacaaatcatcactgatgacatcaaaaagggcgtgtattccccaactgccaagctgcctaccgaaaacgagctttgcaccaagtataacgtcagccgcatcaccgtcaggaaagccattctcgatttagtcgaagaaggctatctgatcaggcagcagggaaagggaacgttcgttaaaagccctaaattaaaacgagagctgatcgctgtaaacggctactcggaatttatggaatcaaccggcaaaaaaccgaagcatcatgtgctgtcccatgacatcattccagcgtcaaaacccatcgccgaaaagcttcaaatccaacccgagagccctgtggttgaattaaaacggattttatataatgatgatcagcctctcacctttgaagtgacgcattatccgcttgatttgtttcccggcattgatacctttattgctgacggcgtatccatgcatgatattttgaaacagcaatacaaagttgtacccacgcacaatacgaagctattaaacgttgtatatgcccaacaggaggaaagcaaatacctggattgtgatatcggggatgcgctgtttgaaattgataaaacggcttttacatcaaacgaccagccaatctattgctcattgtttttgatgcacacaaaccgtgtcacttttaccatcaacagcccctacacataacaggcataaaaaacgagacactgcttatagtattctcgttttttcactgcttcccccgtcctccaagcgataaggatagccatagccgaaagctccgtacacaccgcatgttttcgcagccgtttcggcggcctggcgcaaagcgtacgttatatcctgcttcacgcaaaaggcagtcaaaaagcctgctataaaagaatctcccgctccaagtgtatctattatatcagcttccacaatcggctgatgatagactcgatcacccgcagacaggattgctccttggccccctcgggtcatacaaaccattttggctccgtacccatgagctgttttggcaagctcaccgcattccgactcactcaaatcgcttcctgaaaaaaacgcatacgtcacataaggacagaccctcctcaaataatcatcctcccgattggttgaaaaatcaaatgagacagggaccagcccgcacagctgcggaagatcgttctcaagcctgctgtacacgctcgtatgcagcagatcatgcccgctgataaaagatacatctttctcctgaaacgcgaggcgaagccgggactgaatgccgcctttatttgatctgacaaaaatgcggtccccctgttcatcaagggtgacaatcgccatcccgttttctccgtgcgcctggcggatataatctgcattgacctgctccagcttgagaacgttcaacagatgcgccgcggcttcgtcattgccgacgattccaatataggaagactcatgcccgagccgcttggcaagcacagcaacgtttaaggcatttcctcccgggtaaaatgtttcttgatcctggtagtaatctacaacattatctccaaccgcaatcaatttcatagcgcttcctcctttatccttttacactgccgcttgcaatcccgcggacaaaatatttctgcatcaataaaaatagaataataatcggcgcggctgaaatcgttaaccccgccagcaggacgccccagtctgtctgcagcgcgtctctgaactgcatcagcccggctggaatggtccgtaaattctcatcatctatgaaaataatcgcaaacataaactcattccatgtatggtaagccgtcaaaatgccggatgtcaccaaaatcggcacgctcattggtaagaaaattctgaaaaatactccaaaacttgtacacccatccaaataggccgcctcctccaattcttttgaaatagaaagaaaataagagcggatcaaaatgatggtgaatgggatccgataagccgcatacggcaggattaacgcccaatacgtattgtacaggccaagcgactgaataatagaataaagcggcacaagactgacctgcggcgtcagcatcaatccgccgagacatagcaccaagaagaatccttttcctttaaactcaaaccgggaaaggccatacgctgcccatgcactgataaagacagtgatcacacacgtcagcgccgtaacgatgacactgttcataaaataagaagaaatcccctggttccaggcggaaacaaaattttccggatgccacgatgacggcagcgaccagctgtgctcaaaaatatcgtcagagtttttaaaggcgctcatcaccatccagagaagcggataggcaatcgcaatcagataaagaaacagaaaaacccacacagacgtttctccgatataccattttcgtctaggcttatctttaacctcaatgtgctggtcaggcacaggctccaacctgaacgaatctgtcttcttctgaggcagcatcagttactcctcctttccggttttaaagaacttcatttgcatgagcgataatgcaagcgtaatgattaacacgacagtggcaatcgctgaggcgtagcccatcatatcctttgtaaaggcgcttttatataaaaacgtgctcaagacttctgacgcgtttcccggcccgccgcctgtcaaaatgtacggctcattaaagaccgtaaaggccccggtcagcgtcatgaccaccgcaacaaaagacatctctttcgtctggggaacagtaatatgaaaaaactgctgaattttacccgcgccgtcaagccgggccgcttcatacagttcatccggtattttttgaatcgacacaatgtacagcatcgcaatataaccgacagattgccactgggacacaaaaatgacagaaagcatagctgtgctgtcatccccgagccaggccctcgtcagctgatcaagaccgatggcctgaagcagctgattcaaaagccctgtctccggattgtaaataaaatcaaacaaaagcgcgatcacagtcattgagatgacaaccggcaaaaagaaaacggtacgaaaaaacggcgaccattttctgaccagcttatcctcaagcaccgccgccaaaatcaaaccgccaaatacctggcatacaattgagatcactgcataaagcacattattggtaagtgcctgatagaagacaggatcatgaaataattcaacatagttttttaagccgataaacgttttttccggagaaaatgagctccactgaaacaggctgaggaatacattctcaaaaatcgggatataaacgaaaagtaaaaaaacgagagcgggcaccaaaaacaaataggggattattttattctgattgaccaagggtatctcatctcctttataaaaagaaaaggtgcgaagcttcaccttttctttgatttattcagctgacgccctcacctgctttgctgccttttgaacggctttcatcacctgctgcggtgtcatgtcgccgccaagcatttgctggacgccagttaggtacgcatctgcgacttcaacatcgacatccatatcaaaccatggaaccattgatttggcatcaacaatatgctgaacggcttcacgctgaatggctgttgcattttcttcagtagccgtaccttgcactgcactgtatttcccgacatctttcacgagcttttcgcccattcttttcgacgtcaagaactgcaaaaattccatcgcttccttcggatgttttgttcttgaggaaatcatgaatccttccggcgctcccgttaacgcttctgaagatcctttctgcccgctaatttcaggaaatgggaacatcccgagattaaccggttcaaccagcttgatttccgctgtttccgcatatatcatcgccgactttccgctcttaaattgctgtctcacatattcgtggtcgacggagtttacatgtttattaaagtaaggcatcagctcttgaagcttttcaagtgcttttacgtagccttcatcagtaaattcacccgttttggcgttatagtccttttcccgtgttttttcatcgaccatccgctgattaagcgtgccgatatagtgcgagattgtccaagtcgcctttgttccgaagctgatcggtgtgtagccatgttctttcagcttttttgacacatcgattaattcatcccacgtcttcggggatcaagattcagcttttggaaaatgtctttattatagaagaatgatttagcgtccatttgccacggcacgccatattgcttgttttcataagtaaatggtgtaatttgcgattgaacgagctgtgatgaccaatcggtgtcatttttgtagtaggacgagagatcaagtgctttattgcctctgataaatttaaaagcaaactcatcgctccaagagaagtaaatgtcaggagggctggtggttcccagcatgaccttaattttatctttataggagtcatttaaaacggcttcaatttgtatatcgatatctgggtgttctttttcaaattccttaacaacctcttcaaaataacttttttccggctccttcggccatctgtggaaaaatttcaatgtcacctttccgtccgctgaactgctttggctcgaacagcctgcaatggtgaacatactgacagctgcaatgatcaagaacaacaacattttcttcaaagggttggcctcctctggacattagactataatgttatataacattatagtctaatgcataatggttcctcattttcagatcaatactcaactttccacatgtatcttctatgagataaaggatgatttctcgcctctgccagctcgtctgcatagcttctcagcacacgattgagaacgagcggagcaagatagcctttaactgaatcgtcaattgcagtgaagtcgtaagatgcagcatcaagcacagtgagctttttgccatactttttcgagaaggtaagcgctcgctcttcaagaggtcttgtttcatctaaaccgagcaggatgataaacggcacggattcatcaataatttcaaacggtccgtgaaaatattctccggcatgaatggcgtgggaatgaatccattgcatttccatgagaatgcagatgctgtaggagtaagcgacaccgtagtttgcaccgcttgccatggtataaataatactttctttttcatgggcttttgcaaattgcttggcgttgtcagcttcctgcttaagggctttttcatatacagcctgcaattgatctaagccttcaattgcttgttggaatttcgtattgttttctaatacttgcagggttccaaaaacgatttgatacaaaacgccatagtttgtattgatcgcaagcgcctcatcaccccaatcgtactgggcaacatattgcgcttcctgcgctaaaggagactccggtttaaacgtcatcgcaatcgtaagtgcgcccttgccccttgcaaacgcagcagctttgactgtctccggggtatttcccgaatgcgagcacaaaataacaagagacttttcaccaagctgaacagggttgcgctgaataaattcgttggcgctgtagaggtcggagtttattgattttgactctctgtcaaacacatacttactcggatacataatggcagaagaccctccgcatgcgacaaagaatacatgatcaatggttttccctttcaaatcctgcaagaaagcttgaacctcacgatttacttttgctgtggcctgactcaaatccttcactccccgtttttattatataacgttatataacattatatattgttatattaaagtccgcgggtaggattgtcaatattattttctgaaatttctcaataatttattcgaatgacagacaaagggtcaataagcgaaaaaatgcccaaatcaaaagccagaacttgacttaagctctggcttcgctgttcaatccgcagactgacgtcttatttaaaaaataccttgtctatattgtacttcgagtgctgtgtattgatgatatatgtttcataaatctctctttccattggatcatcaactacacatacctcaattttataaacttcatctctgtgatgtttgatcggtgaaacagtgtcttcgaaatgcttcttaattctctgtcttaactttctggctttaccgacaaacagcagctcgtcatgaatgttgtaaaacataaaaatgccgcctttgtcccttgggatctggtgaaagtcgatgaatccgtgaatcggttttatcttcggctcgttatcattagctgactgctgtcgttcagtgatggtgacattcggtgcgggtatatcaatttttatcaaaatcagttcacgtcctctttttcattaaagataaatgctaacacatacagaaaagaaaagctagaacagctttattatatttgtttgttatgctcttgcttattatgcaagtgctccggctggatgataaggactaaggtctaattctgtctgctttccgagaactagctttgcgagctctgcacccaagaacggtcccatcgtcagtccagaagcacccaaaccgtttgcagcatataggccttgaacattcggcacggcccctacgaccggcagaaaacccggtgtaaacggcctgaagcccactcttgtttcaactgcagcggcatcagcaagacccggtgcaacggctaacgctttgctcaatacttcgtgcaggcctccggctgtcacacgaagatcatcaaggcctgcatcgttttcgtgtgtggcgccggctacaattctgccgttatcaaacgaaagaatgtactgatcactcggcggcattacaaccggccacgatcctgtatctgtatctgtcatttcaaaatgcataatctgcgctttttgaaatgacacttgaaaatgaatgccaagagacttcaatatctcattggcccatgctcccgccgtcacaatgaccgcgtcagccgcaaactgctttgcatctgtttgcacgccgttgactgttccgttttcaaaaagcaaagacgcatttcctttgatgaccgttgcgccgcgtttctctgcagcgcttaaaagcgaccggcacagcgctcttccgttcacacgggcggcaccgctgatatgaaccgattcatagccgtcagctaaaatcggaaacagctttttcgtttcacttgcagacaagcgggtaatgtcgccgatttccggcgcatcctcccgtctcttatacgccctttcctccattttatcgagtttagacgcgtccgtatgaatgctgatggcaccgacacgtttgtatcctgtatccgtttcaccgtctttttccaattgatggattaaatccttatagtaccgggctccccccttagcaagctggtaccaatcctgattacggcgttgcgagagccatggacagacgatccccgccgccgcatcagtcgcttgtcccggctctttccgatcaatgacagtaacgcgagcgcctgattttgcgagatgataagccgtcgacgcgcccagaatccctgcgccgacgatgatgtacgatttcatatgcaaacaccttttctattataatgtctattcattttaccaaatcgaatgctttccttcgaccttttgccctaatgtggaaaaaccgcgaagttcgtccaatctctttactctcctatcgaatatcctgtcactatcaatagagaaaggatgataccatgagcgaaaatcgtcatgaaaatgaagaaaacagacgcgatgcggcagtcgcaaaagtccaaaacagcggtaatgcaaaagtcgtggtcagcgtgaatacagatcaggatcaggatcaggcacaggcgcagtcacaagacggagaagactaatgaacgaaaacatcattcctctcaacagacatactcaagagatacccactactgaatctgttatcaaaaacagcggcaactcagaggtccatatcgacattcacattgatacaatgccaattgcttttgctatattatgctctgcattagccgcaaagcagatgacaaaagaggaattcgatatggcttatactcaattgcgagagatgaacagagaaaataacagcagatcatctgtaaagcaaattatcaatcaggagacagaagaagagtaaaaaaccgcggcccctcggccagcggtttttcttctgcatacaaaaaggacgcgactgaaaaccagtcgcgtcctttttataaaaaaataatcgattgaaccttccatttcgaacttgattatttttataaaatggtacggaatgatttataaaagggtcacccaaacccttgatttaaagccatttcttcagatggtttaaatgatgataatcttaacttggcaccgtgttggcatgagctgaagccgcatgatataagggtttacagtaataattcacggttgccgccgtgagtaagtttcatatcttttgaaagttattattgaagtaatgcacctgttagttgaactattccacggcttatttaaactgtactaatcttttgaaatagaaataccgttctcaataaaatgctttattcatatttaaatttttgaggctactaggcatacatccaaaccaagttttgaccctgagcgtaaactagttaaaagtctaattgcaataaggagtgaacctcgaataatggtatatcaaagacaaatgacaccctatgccctgaatccccgggatttacaaaattgtttgtatcgtttcacgtatttgtggcttagaaataatgataatttctggtatttcttaacggctatcggagaatcaagagtttatggatataggtttttcggtggaagatggaataattattccgttgatttaagagatattgtttccttctattgttctcctccgactccaactctatattaaaacactgagcctgatatttgcatatgaagaaaatatttgtgaattaaaaaaggtcaaagcaaaatgaattgaatcttgaaatatccaggattcaaaaaaacaaagatgtaatcattttctaaaattacaataggcactatcttacacattcgaaactatcacaagcttcaggggttgaatatagaggcttacacgctttcagacacggttggacactagaacactaaaacaataagtgaaaaatattcacacataactgaaaaaatcgaacaagatgagcttgcaaaatttgcttcttactcaacaagataacaaaaagcttggcataaaaattggcacaatagaaacttggcatatgtcgaaaataagaaaaacccttgataaacaagggtttttcgttagttatccaatagaaccttccatttcgaacttaatcaaacggttcatttcaactgcgtattccattggaagctcttttgtgaatggctcgatgaagcccattacgatcatttcagttgcttcttcttcagaaataccgcggctcatcaagtagaagagctgctcttcagatactttagacactttcgcttcgtgctccaatgaaatgttatcatttaagatttcattgtaaggaattgtgtctgaagttgatttgttatccataatgagcgtatcgcactcgatgttagagcgggcgccttccgctttgcgtccgaagtggacgattccgcggtacgttacttttccgccctgttttgaaatcgattttgatacgattgtagatgatgtgtttggtgcaaggtgaatcattttcgcacctgcatcctgatgctggcctttacccgcaagagcgatagaaagcgtcataccgcgcgcgccttcgccttttaggatacaagccggatatttcattgtcagcttagaaccgatgttgccgtcgatccattccattgttgcgttttcttcacagactgtacgctttgttacaaggttgtaaacgttgttcgcccagttttggatcgttgtataacggcagtagccgccttttttcacgatgatctcaacgaccgcactgtgaagtgagtttgttgtgtaaacaggcgcagtacagccttcaacataatgaacgcttgcttcttcgtcaacaatgatcagtgtacgttcgaactgacccatgttctcagagttgatacggaagtaagcttgtagcggtgtttcaaccttcacgcctttaggcacgtagatgaaagaaccgccggaccaaacagctgagttaagcgccgcaaacttgttatcagtcggcgggattacttttgcccagtgctcacggaaaatatcttcattctctttcagcgcgctgtcagtgtctttaaagacgatgccttgtgcttcaagatcttctttcatgttgtggtatacaacctcagattcgtactgagcagaaacacccgcaaggtatttttgttcagcttcaggaataccgagcttgtcgaatgtttgtttaatttcttcaggaacttcatcccaagaacgctctgaacgctcagacggttttacgtagtacgtaatttcgtcaaagttcagtgagtttaaatctccgccccattgaggcatcggcatattgtagaaatgctcaagtgatttcaagcggaagtcaagcatccattgaggctcttctttcatgcgagaaatttcttctacgatttcttttgtcaatccgcgctctgaacggaaaatggaaacgtccttgtcgtgaaaaccatacttgtattcaccaatatcaggcatttttttagccatccattttcactccaatccttttaattgccgccttcttctttcgcgactcctttttcaagtgctttccatgacagggttgcacatttgatacgggcagggaattttgaaacgccttgaagggcttcaatatccccgagatctatagaatcatcatactctttcccttgcatcatatccgagaaaatcttagacatggaaagggcagtttcaatatctttccctttaatcgcctgagtcatcatcgaagcggatgccattgaaatggaacagccttccccttcaaacttcgcatcttccacgatgtctccgtcaagcttcattgtcagtctgatgcggtcgccgcatgtcggattgttcatatccacgacaatgctgtcattcaaaacccctttatttcgcgggtttttgtaatgatccataatcacctgtctgtacaatgtatctaagtttgcattaaaagacatttgtaaaatactcctttgtcttttgaagagcttccacaagcttatcaatctcttcctctgtattatacagataaaagcttgctcttgcagtagcagttacatccagccatttcatcagcggctgcgcacaatggtggccggctctgactgcgattccctccgcatcaagcacagtcgccacatcgtgcggatgaacatcatcaaggttaaatgtgacaagcccggcacgctcttccggcccgtaaaccgttacgccgtcaagctggcggaagcgttcaagcgcataagctgcaagcttgtgctcatggcgggaaatctcatcaagaccgatttcttcgagaaaatcaatggcggcaccgaggccgattgctcctgcaataatcggagtacccgcttcgaatttccacggaagctctttccaagttgattcataaagcccgacaaagtcgatcatttcaccgccgaattcggcaggctccatgttttccagcagggctttctttccgtacagcacaccaacaccagtaggtccgcacattttatgggaagaaagcgcaaagaagtcgcaatcgagatcctgcacgtcaattttcatgtgaggcgtgctttgtgcaccgtccaccacaatgacagccccattgtcatgagcgattttcgccatttctttaatcgggttgaccgtgccgagaacattagatacatgagacaccgcaacaatttttgtgttgcttgtgaccgtttctctgacgtcttctaaagaaatcgttccgtcttcctgcagcggaatatattttaatgtggcgccagttgcttttacagcctgctgccacggaatgatattcgcatgatgctccatgtaggtgatgaccacttcatcaccaggtttcaggttggcgcgcgcatagcttaacgccaccatattcagtgatgtggtcgtgccttttgtgaaaataatctcagccattgacttcgcgttaataaactttcggactttttcacgcgctccttcataaccatctgtcgctctggttccaagtgtatggacgccccggtgaacattggaattgtattggttataatacttatccagtgtttcaatgacagcacgcggcttctgggaagtcgccgcgctgtcgagataaacgagatcatgtccgttcacttgctgatgaaggatcgggaactgttcacgaatatctgtgatattcattacttcactttcctttcgataacagaaactaattgtttcttaacgccttcaatcggaagttcatttactaccggtgcaaggaatccgtaaatgactaagcgttctgcttcttctttcggaattccgcggctcatcaggtagtaaagctgaatagggtccacacggccgacagatgccgcatgtcctgcagttacatcgtcttcgtcaattaaaagaatagggtttgcgtctccgcgtgctttttcgctgagcatcagcacgcgtgattcttgctccgcattcgctttagaagcgccatgttcgattttgccgattccgttaaagatagaagaagcggaatccttcatcacaccgtgcttcaagatatagccttcagaagctttaccgaagtggatgatttgtgttgtgaagttttctgtttgctctcctcttccgacaacaaccgttttcgtatcgccgtatgtgccgtcaccgtaaaggtttgttgtattttcggaaatcgtgtcgccgtcgttcatcaggccaagagcccactcgattttgctgtcgcgtccgcgcgcagcaccgcggcggttcacataagttgtcacaccgcttgacagattatccaccgcaccgtatgtcacgctggcattatcacctgtgatgacctcactgataatattgaagacagcgtctttcgggtttacagtgctgatgtagttttctacatatgttacagagctgtggtcttcagccacaatcagcacgtggttgaatagagctgtatcattgctttcgtggacataaacagcctgaaccggcgtctccacctgaacatttttcggaacataaaggaatgctcctccgttaacaagagccgcgtgaagtgcagttaacttatgttcgtcaaccttcacgccgtccttcataaagtatttctccaccaagtcgctgtgctcgcgtgcagcagtcagaatatcagtgaagatgacgcctttgtctttcaattcttgagaaagagaaagatgtgccggcgtctggtcacgctgtacgtataatgttttatcttcgttttcaatgtcgatcagcgcttttacttcatcagtcaaatcttctaatgaagaaagcggttcgttatccactgtatgcttcgcgaaattcgtgaagttccagtttgtgatttttgttttgtcaggtttcggcatcggcagatcctcagcttgttcaagagcctgtaagcgcaggttcttcagccaggcaggttcttggtgcttttcggaaaagcttttgagatactcctgatctacggatagttttgtacctagtgtcatattaatccccctaacgcttacgcttcttggccaacagtttcgtcttcaatgccaagttcttgtttgatccagtcataaccttctgcttcaagacgctgtgcaagctctgcaccgccggattttacaacgcggccttgcatcataacgtgaacaacatccggagtgatgtagtttaacaggcgctgatagtgagtgatcatcaggcagccgaagttttcgctgcgcattttgttgatcccttttgatacaactttcaaagcgtcaatatcaagacctgagtcaatttcatcaaggatggcgattttcggttcaatcatcattaattgaaggatttcgttgcgttttttctccccgcctgagaagccttcgttaagatagcgctgagccatttcagggtccatttcaaggaactccatgttttcgtccattttgcggatgaatttcatgagagaaatttcatcgccttcttctctgcgcgcgttgattgctgagcgaaggaagtcggcatttgtcacaccgctgatttcacttgggtactgcatcgcaaggaataagcctgcctgcgcacgctcgtccacttccatctccagtacatctttgccgtcaagcgtgatgctgccttttgttacttcatatttaggatgccccataatagcagctgataaagtggatttaccagttccgttcgggcccattactgcgtggaattctccaccttttatttcaaggtttacaccctttaagatctctttcccttcgatttcaacgtgaagatctttgatcgttaatgttgaagcagccatatctatacctccaaaaatatataatcattattctcattttattctcattctaattttataacaaatgaaaagtaaatacaactttttatcgtgccttgcacattcctcaagtttaacaaagatcagcactttattaaagcgattgaaaaagaaaaagagtggattcccacccttttttaaaagattgattttctcaataagctcccgcagaaatccgcttgcttttttcgtaatcaagctctctctgccgctctactttcattcttgtttccagccggcgtccatattcctcgtatccaattccgtgtgacagctgcatcgctttttccatttctgacgtataatcgaggttcagtctgtcctggctactgcaaataatgaatcaatcccttcatatatttgctttttattgtaccagtgctgcgttggatgccgcaaaaacgatttggcgtgaaatagcggcagatgagacgaaagcatcctttcagaacaaatgagaatggtttttcggaatattccttctcttaatgcgtggtgtttccgaattcctcaatgcactgttgaacgactgtcacgccttggctgaaagctgcgccgcctccaaatgccgctgccacactgacggcttcgagaatgttttcttctgtcgctccctgatcgagacagccttttgtatgatagatcatgcaatattcgtcctgagcattgatggcaattccgagggcgatcagctgtttttctctttcagtcagagaattcccggcaaagcactgttcagtaaattcgttaaattttcttcccatcagcggcatcttttgttcaaatgtgcctaaaccatgtttatattgttttaacgcgtcctgcatgcttcctctgtcttgattcaaagaaaatccctccatctgtttaacattcctttttattatgaacagcttttaggaaaatacgcgaaaaaaccccggaattctcatccggggtttcagtcttattcagatacaggaagcacagctccgtcgtattttttctcgatgaagtctttgatctttttagagtgaagaacttccatcagcgctttgatttttgcagaatcttcttcgccttttcttactgcgatgatgttagcgtatgggttgtttttcgttgattctacttcaattgcgtcttttttaggatttaatttattttggatcgcatagtttacattgatgaagaccgcgtctccttctttgttttcatatgcttttgccgttaattcaggcgctactttttcgaattcaagatttttcgggtttttcttaatgtctttcaatgttgcgtcaactgtttccactttagaatcaagagtgattaatccagcgttttcaagcattgcaagcatacgtccttgttcagcaacgttgtttgtcagaatgattgtcgcaccgtctggaaggtctttcagtgatttgtatgttttagagtaaataccgaatggctctaagtgaacagcgccggcattcacaagtttgtaatctgtgttttctttcatttcttgctcaaggtaaggaatgtgctggaagtagttcgcgtccacttctttatcagctaaagctttattgtacattttgtaatcactaagcactttcactttcagcgtatagcctttttctttcagcaatggttcagcttcttttaaaatttctgcatgcggtgttttcgttgccgcaacgacaatttctttcttgccggattcagcgccgttattcgaaccgcaggcagccataactcctgcaaatacaagcagtaatgcacccaaaaatagctttttcaatgtaaatcctcccttatcgtttgtctataatatttgttattagatcaccgatgatttgaataataaacacgatgattaaaataaacacagtagcaacgaaggtaacatcagcgttattagactgatatccttctacgtacgcaaggtttccaaggcctcctgaaccaatggctccggcaattgccgttgagccgatcaaagcgatggctgtaaccgtaatgccagaaataagagcaggcattgattccggaatcagcactttgaaaataatcgtagacgttttcgcgcccattgatttagctgcttcaatcacacctttatccacctcacgcaacgcgatttcaacaaggcgcgcgtaaaatggtgccgagccgattaccagcgccggcaatgcggcgtttggccctaagatcgtgccgactaaaaatttcgtaaaacctaatagtaaaataattaaaataaggaacggaatcgatctgaatatgttaacaacggccgcaatcactgagttgaccgctttattctgccagaggcttcctttgctcgtcagaaagagcagcaagccgaggatgaccccgatgacaaaagcaaacagtaaagaaatcagcgtcatataaagtgtttcatatgtcgcgttccataattcagttaaatcaacgttcgggaagtatttttcaaacattcgtgatcacctctgctttcacctgtttgtcattaatgaaacggatcacgttttgcacttcttcctcgtccccgtcaatgtggatgaacagtgaaccgtaagccccatccttcgtctgcgaaattttcccttgcagaatattgacgctgacattgaagtttctgatcatctctgtaatcagaggctgttcagctgactcaccgacaaatgtgagctgaaccatttttcctgatgctgtatcatcaagaaggtgctgaagcgtctctttcgtttcttccggctctgtcacctgctgaacaaatcgttttgtcatttgttcctttggatttttaaagacatcgagaacctcgccttcttcgaccaccttgccgttttccatgacggcgactctgttgcagattttgcggatgacatgcatttcgtgcgtaatcagcacaatcgtcaaaccgagtctttcattaatatcggacaatagatccagaattgaatctgtcgtttgcggatctaatgctgatgtcgcttcgtcacaaaggagaaccttcggattgtttgcaagcgctctggcaattccgacacgctgcttctgaccgccgctcagctgggacggatatgatttttcttttccttctaaacctaccagtttaatcagttcattggcgcgcttgatccgctcgctctttttcaccccggcaatttctaaaggaaacatgatattatctctgacagtccgcgaccaaagcaaattgaaatgctggaaaatcatactgatctcatggcgtgcttttcttaaaccgcgtccatttacttcattaattttggttcccgccacttccacggttcctgaggttggtttctcaaggccgttcagcagacggattaaggaactcttaccagctccgctatatcctataattccaaaaatctcaccttttttaatggaaagcgagacattttggacagcattgacatctccatgtttcgacttgtaaacttttgaaacatcctgaagattgatcaaagcaatcacctgccttaacactattctaagaaatcttccggttttttctgcaaaagaaaagcctttctgcacacttgagcagaaaggcttatataaaatgcctttctctcatctttcaaagctgaacgcttcgtgtgaattggcaccatttcaacagtgttgatggttgccgggcttcatagggcacttccctccacctctcttgataagagaaatatatagtctttttcgtccggaaattcttaatgtagaatagcacggcgaatgattaaatgtcaataaaataaatgatgtcaacttttactattataataatttattattttttaattttttaaaatcctctgaaaaaatccatttgtcagccagagaatggcttccagctttaacagggccctgaatgacccctttactttgaggcttccgctctgaatcaggtgctgaagggaaatgtctccgtgcaataaatcaataatttccgtttggtttccgtaaaaggtcaggttggacgtttggggcggagaaacttttttcatttctccctgttcgtttattgagacggttaaggcttctgcttctccttggaaggtaatgagcaatgttgaggcattcaaaaggggttttaaaaacagatgctgatactcatcctctaaaacttccgctttctccatatgtacaacctcctatttgttggtcatacatacacatttctctctttgtcgcaagaacccctttataaaacgaacgacaatttcataggatatgctgagaaatatgtcataaatgggatgcggaagatgatttttgtttgatcagctcatataaataagaaacggaatgaaatgcatatcctctttcgaccatctttccgcctttaaacagcagaaaacaagggacgctttcaatttgatacgcttttgcgaatgtcggagagtaattgacattgttttgatagaaggcgacatccggcagcatttctttcaccactgtcagcattttgcttgcaagctggcaggtgccgcaaaacggagtatataaatatagaaggtacacatcatcttcaatgtgatcaagttcgtgttcttggagttctttcatgctatacacctcgggactttctttcaagaaaaatagtatggacattcagattcgcacgcagtaatacagaagcgacatggtgcctgggagcagccgctacttccttataggctctgtcgatatggagatggcaggcttcattaaattcacgcttcagctgttttctcaatttctcacctgattcatcagcatcaactaatatatagacgtctttatcataaagctcgtcagccaattcctcgagcctcagctggctgattgttccgtttgtgcagataatgcgcaccggttcattcaggacgctttcgattttctctttatctgatttcccctcgacaatcataaccttttccagctcatccatcttcatcttgttcacctgccgcgtcaaatttgaaacgttcagattgtaaaagaaggcagtgaaattcaccgccaacattaacaccagccgttttcgtagtcacaatctacatattttgcgtcgtctccagagaccacatcggctgtcttataaaatttctcattttcaaaggaataaccggacttaagctcatattcattcatgcttgtcatttggccgatcatctcattatcatgatataacgagagccggccattttgaaagcggcctgtcacgtcattggtgacatcgagcttttgtttgtcgaaagccatattggacacctcccataacgttagcgtgtccaattgcttttacggctatcctgttttagtcttcttgtgtcatctcttcgtattgctctgctgtcatcagtttttcaatttcagaagcgtcagatggctcaacgacgatcatccatgctttttcgtacggagattcgttgacgaattccggactgtcatcaagatcttcgtttacttccacaaccgttccgttaatcggtgcataaagctcagataccgttttaacggattcaacactgccgaatggctcgtccgctttgatttcagcgcccacttcaggaagttcgacaaacacgatgtcgcctagttcggactgggcaaaatgcgtaattccgattctggctttttctccttcaacttttacccactcgtgttctcctgagtaacgcaaatcttttggtatgctcaattgaatccctccattttttacagcactacaataagaagataccacacttttcaaaaaaaatttacattaagcccagttttcttcaaattggtcttctttaaatccgacagtcactttttcaccgtctgttgtaagcgggcgtttgatcagcataccatctgaagccagcagctcgagctgttcgtcctctgacatgtgatacagcttttccttgagattgagctcgcggtatttcatgccgctcgtgttgaaaaatttcttgagatccagcccgcttttttcataaagcgcttttaattcttctttgcttggcggctgctcagcaatatgtatttcgtttatttctttcccatgctcttcaagccacttctttgctttgcggcacgttccgcatttagggtaccagtaaaaagttaacgacatcttcttccccctcaataaaataatcgaggttattttaacacagtttgttttaaaaacctaaaacagtgcttcttaaaaaagagctccgcgcatgcggagctcatggccaatcagacagtatatttctcagcctcaaaaatgcctgccgccgcctcgcgttttttctgaatcacgtttttaggcgttacgcgtgtcagcttgcgcagagcggaaagcatcatgcggagtgaatctccttcttccattgcgataagggattccttcgcatgcgcttcaatttcgttaaaggcctcttgaacgaaaatttctgtgtacagcaccttttgcgctgctttttcagcgccttgtgcggcaatggccttttccgttctgagcacggctgattccattgcgtatacattgctgacgatatccgctacgttcacgagaatttcttgctcacgatcgatcgcttttccgtatttttgcgcggctaggccggcagcaaacaacgcaatttttttggcttgcttgacgatatatttctcctgctctaagacgccgcttccaggctcttcaggcataagcatcatgagttcttcctgcagcgactgcgctttttcgaataaaggcagctcgcctttaagcgcttttttcaggaaggtgcttggcacgattaaccggttgatttcgtttgtgccttcaaaaatccgattgatccttgaatccctataggccctttctacttcgtattcctgcataaagccgtagcctccatgaatctgcacgccttcatcaacgatataatcaagcgtttcagagccgaataccttattcagagagcattcgatggcgtattccgcaatcgatttggcgatttgccggccgtccttgagatcttcggccgtgaactggctcatattgtcttcaaacagcccgacggttctgtatacagagctttccatcgcatacagccttgaggccattgtcccgattttttcctgtgtcaatgaaaaaccagcaatcggcgttttaaattggcggcgctgatttgcatatgccgcagacagctcgatgacgcgtttagatgcgccgattgtgccaaccgccagtttgtaacggccgatgtttaaaatattaaaggcgatgacatgccctttgccgatttctccgagcaggttttcctttggcacttcagcttgatccagaatgagggttcttgtcgatgatcccttgattcccattttcttttcttccggtcccgtggagacacccgggaactctttttctacaataaaggctgaaaacttgtcgccgtctatcttggcgtaaaccacaaatacatcggcaaaagcagagttggtaatccactgtttttcccctgttaatacataatgggttcctgcttcattcagcacagctgttgtttttgctccaagtgcatcagatccagagccaggctcagtcagagcataagcggcgatcttttcgcctgaagcgagtccaggcaaatattttttcttttgttcttctgatccgaaaaagacgatcggcaaggaaccgataccgacatgcgcgccataagaaagagaaaagcttcccgcacgcgaaaatttctcagtgatgagtgccgagctgattttatctaggccgagcccgccgtattcttccggcacatcggcaccaagcagccctagttcgcccgctttcttcaacagtctgacagaatgctcgaattgatggttttcgatatcatctatatgagggagaacatcttgctcgatgtaatcctctgttgttttcgcaatcattttatgctcgtcagtgaaatcctccggtgtatacatttgatcgtatgtgacatcctcgattaaaaatccgccgcctttttgtacgtcagccgctttttttgccatttgtttttccccctttagcataattcaaatacaccggccgctcccattccgccgccgatacacatggtcacgactccaaattgctcgtttctccgtttcatttcatggatgagtgagagtgtaagctttgtgcccgtacagccaagcgggtgtccaagcgcgattgcgcccccgttgacattcactttttcttcatcaattcccaattccctgattacttgaatggcctgtgaggcaaaagcttcattcagttcaaacaagccgatgtcctgcagctgaagtccggcaagcttcaaagcgcgcggaatcgcttccaccggtccgattcccatgacttccggcggcacgccgcctactgcaaaggaacggaatttcacaagcggcgccaggccaagagcatcggctttttcccggtccatcagcatgacagccgccgctccgtcacttgtctgcgaggaattgcccgcagtcaccgtcccatcaacggaaaaggccgggcgcaatgtcgataagatgtctgcagtcgtttgcgggcgaacaccttcatcctgagaaaacacaaactgtttttccataggcttatggtcttctccgatttctgtcaccgtcacttctacgggtacaatttcatctttaaattttccttctgcaagggctttagcagcgttttggtggctgcgaacggcaaacgcgtcttgatcctcacgggagacgccgtattttttcgcgacttgctcggctgtgtggcccatgctcatataatattccggtgccttttctgccaaagcaaggttcggacgggtaacatgccccatcatcggaacttgcgacatggattctgctccgccggcgatcgctgtatcgtaggcgcccagcataattttttctgctgcatatgcaatagactgaaggcctgaagagcaataacggttaactgtaatcgccggaaccgtgtacggcaggcccgcgagcgcaccgatatttctcgccatattaagcccctgctccgcttcaggcgttgcacagccaataatcaaatcgtcaatattgccttcgtaaccgcctgcccgtttcagtgtctcttttacacaaatcgctcccaaatcatccgggcgaacggtggccaacgatcctttttttgcttttccaaccggtgttcttgcacctgacacaatgactgcctctttcataagctccctcctaattccgtaaaggtttacctttcacaagcatatgctgcattctcgcttgagattttgcctctcctgacaaactcaaaaacgcttctctttcgatctccaataaatactcttcatcaacctctgtaccaaacggcacttttccgcccgcaatgacataagcgagttttttcgcgatcttaaaatcatgctcagatatatagccggacagcttcatctgctcagcgccaagcaagagtgccgcataaccggtttctcccggcaccttgaccttttcttttacaggcggccgccagccggtatcgtataaagatgcggccagctgcttcgcatcgtataacaggtggtcttgattcacgctgatctgatccgtttcttttaagatgttcatctcacgagcctcttgagcggaagcggacactttcgccatcgcgattgtttcaaatgttttcattgccgcattcatcggatcatggccgcggcgaagatggttgatgtacagctctttgttacctcctccgccagggatgaggccgacaccggattccacaagtcccatataggcttcgcttgccgcttgaatgcgcgccgccggcaggcatgcttccgttcctccgccgagcgtcatgccaaatggcgcggcgacgaccggtttcgcactgtatttgatcttcatcatcgtctcctgaaaacggcggatcacaaaatcaacttccaaaaagttgtcatcttggacttccattaagatcatggcgagattcgcgccgacgcagaaatttttcccttggttgccgatgacaagccccttgtaattccgttctgtttcctctaatcctttgtggatcatttgaatgatatcgaggccgatcgcattgcttttcgaatgaaattcaagaagggccacatcatctccaaggtcaattaagcttgctccgctgtttttcgcaatcacgccttttgtttctttaagtgcttgtaaatgaattcgttttttattttctttcacggctctgtattcgccgcggtcataataaaataccgttccgttctctttgatgtagaaggtttcatttcctttgtccagcatctcttttatccagccaggcatatctgctccaagctgctcaagcttttccgctgactgcttgaggccgatggcgtcccacatctcaaaaggtcccagttcccagccgaatccccacttcatggcttggtcaatcgcatgaatatcatcggcaatctcgccaagcagctcggctgagtaaagcagggtttgagaagtgatattccacagcaaacggccggccctgtcatccgaataaataagcgctttcattttggcttttgtcccttttgcctgttttgccgcttcaagtgccggtgatttcatttttgtccgctcgccgtaagtaagcgtcactgggtcaagctcataaatcgtttttccttcttttttataaaagccttggccggccttgcttccgatccaccctttttccagcatatcgttcatgaagcttggaaggcgaaacacttctttttcatcgccatcagctttgtcatacacatttcgggcaacgtgggcgaatgtatcgaggccgaccacatcaagcgttctaaaggtggcgcttttcggcctgccgatcagcggtcctgtgatcgaatcaacctccccgacctgataaccgcctttcagcatttcttggactgtcacgagaagcccgtaagtcccgatgcggtttgcgataaagttcggtgtgtcctttgctgtaacaacgcctttcccgaggacattttctccgaaagctgtcataaactttaaaatatcaggatccgtttccttaatcggaatgatctctagcagctttaaatagcgtgcgggattaaaaaaatgcgttccgagaaaatgggctttaaaatcatccgaccggccttcagccatttcctgcactgatatgccggatgtgttgcttgagacgatgcttccagtctttcgatgttcatccacaagagcgaaaattttctttttgacttcaaggttttcgacaacgacctcaataatccaatctgcttctttcagtttttctgcatcatcctccagattgcccggtgtaatataggaggtatttttcgctgatgtgaggggagcgggcttttgtttcagcagttttttcaccgcctgccggctcagcctgctgcgcatctccggactgtccttcgtcagcccccttttttcctcttcctttgtcaaatcgttcggcacaatatctagcagcaggacaggaattccgatgttagccaaatgcgccgctatcccggaacccattacccccgatcctaaaacggctgccttccgaatgtgtttgtgcatgagatatcccccttgaacattgaatgaatagtcattcattttttgaccaaaaaaaatgaaacccgtttcttctttcatcttaaaagatttccggttcgacttcaatagctaatttgttatttttttgtatgaagcctataaaagtcgggcaacttaagcccggaggtgaagggaatggtacgagagaaaaaaaatccgtcttcagcggcagtcagcgcggcgagcgtaaagggagatgccggtccgactcagcattacggcggcggaaaactgacaagtcaaaatcagcagtataaaaaacataacatggaacaatcataatgcagctgcttcccgcggctgctttcactttttcaaaattccttttaacacaaacgctgcattggcaggccgctcggcaattcttctcataaagtagctgaaccagtccgttccatatgggacatacacacgcattctgtagccttccttggcgagttccttctgacgctccggcctgatgccgtatagcatttgaaactcaaattgcgacgcggggatttgatgttcggtgacaagctgtttcgtaaatgcaatgatgtcatcgtcatgtgtggcgacagccgtgtagttcccgcttaacaactgcagctttattaagctctgaaaatgaaggtccgttcctcttttgtcgggaaacgctacagccgcagattctttataagcgccttttacaagtctgagattcggctttaagtcccgcatctttctgatatcttctgccgcccggtacagatacgcctgaatgaccgtgccgagcttctcaaattcctgtttgcattgcctgtaaatagaaagtgtctgttcataatgagtatagtcttccatatcaatggtcacagcaacatcatattgcttcgcaacggaaagaatggcgcgcaaatgagtaagagcaagttcttctgaaagatcgagcccgattgaggtcagcttaagtgaaagctctgaattcaattgatgttcggcaatggcttgaatggctttcttgcattcctctgcgacttggtttgcttctttttccgaagctgcatactcgcctaaataatcaattgttgcacacaaaccggatctgtttagccttttgacggtcttaaccgccgattcaatcgtatcccctgcgacaaaccttcgtgctccaagccgcgttccgtatgcttttgcgaacttggtaagtgttttattttgagataagaataaaaacacatgtctcagcatccgactccctcccgccgtcatcttcaaaacacctgtatataactcccagtctgaaggaaactataaaatgaacagaaaccaaaggaggatcacaatggataatcagcagcaatctcaaatgccgccttccgttatttcgacaaaggatcatttgtatctcaatgacatgctgaactggaatttgctcgcgatgaagaaagcgcatttcatggcgcagcagtgccaggatcaaacgttaaagcaagaactcgaccgcgtcggacacatgcatcatgatcactatcaaagaatattaaagcacctgcagccaggccagcagcagtccggctacatccaataaggaggcgccagaatgaatcagcaaaatcaaaaaatcagcaacccgcagacacctgtaccgacaacatcggaaatgaatgacagagatttcgtcaacgaattgctgacaaccgaaaaatacatgacaacagcttattgcactgctttgcacgaattcagccacgagtctctttatcaggatattcaatccatttttgatgagtcacaaaaagcgcaaagaaaactatatgatctcatgtttcaatatggatggtattctgttgaagcggaggatgcacaaaagctgcagcagtcctatcaaaaattccagcagaccattcagcagcagtctccttatcagcaataacaacattagtaaaaaggatacgatgttctttagggcatctatcctttttttgtgtaaaatcagttgacttttcatttacgcttatttatatttaataagcattaactattttgtcattaaaatatatatacagtgtatgtaacagaggggaaatgaatatgaagagtgcggatcagttaatgtccgatattcaattatcgcttcaggcgctctttcaaaagatacagcctgaaatgctggaaagcatggagaaacaaggtgtcaccccagcacagctgtttgtgctggccagcctaaagaaacacggcagcctcaaaatttctgaaattgccgagcgtatggaggtgaagccaagcgcggtgacgctgatggcagatcgccttgaacaaaaaaatcttatcgccagaacacacaacacaaaagacaggcgagtgattgatctcagtcttactgacgaaggagacagaaagttcgaggaggttttggcaggcagaaaggccattatggcgcgctatctttcctttttgacgaaggaggagatgcggcaggcggcgcatattacagcaaagctcgcacaagcagcagaaacggatgaaaagcaaaacatgaaaagaggaaacggatgaaaatgagtaaagaaggcaaacaatcaaaacgaacgttattaataacaggcttaattattgccatgtttttttcagcccttgacggtaccattgtcggaacggccatgccgaaaattgtcggtgatctgggcggtttgagcatgatgacctggctgacaactgcatatttgttaacatcaacaaccattgttccaattgccggtaaactggctgatttattgggacgccgcattgtctatgtatcaggtttaattattttcatggctgcttctgctttgtgcggaatggccaacaacatgacagaattgattatcttccgtggactgcagggaatcggcggaggcatcatgatgccgatggcgatgattgttatcggtgacttgttcacaggaaaacagcgtgctaaattccaaggtgtctttggcgcgatttacgggctggcttcagtgattgggccgcaaatcggcggctggattgtagactcgttaaactggaaatgggttttctatattaacctgccagtcggaattattgcggttatttttattgccagaggattacagggacgccagcagactggtccgatcaacttcgatatcgctggtattttcacaatgattgtcggtgtggtcagcctcctgctcgccttaagctttggtggaaaagattatgcatgggattcatggcagattcttgggttgttcgctctcgcactgatcggcattgtcagctttatcatcgtagaatcaaaagcaaaagagccaatcctgccaatgtatttatttaaaaacagaacatttacatttctaaacttgatcggcttctttatgagtatcggtatgtttggcgccattacgtttgttcctttctttatgcagggaattgtcggtgtaagtgcgtctgaatcgggtacaattatgacaccgatgatgatttctatgattattacaagtatcatcggcggacagcttgtttataaaatcgggattaaaccgcaaatcattgcaggcatgctggttatggccggcggattcctgctgttaacgaccttggatctcgacacgagcaagcttgtcgctacatcttttatggcgattattggtctgggaatgggtcttgttatgccgattctgacattggctttacaggaaagcttttcgaaggaggagcttggagttgtcacttcatccagccaattcttccgttctatcggcggaacattcggcattaccatgctgggagccgtaatgaatgcgagatcaggaaatctattaacagataaattggttccatatttagactctcttccggcacaggcaagctcgtttgccgcccagctaaagggtatgattgatacaaatccgcaagggctgctgcaatcactgttcagtccggacgcggtcaaacaaatccctgcggctttctcatcccatattgtgccgattttaaaaacatcgttgatggattcgctccacagcgtgttttatacgggcctgatctttatcgcagtcggagccgtattcaccttgttcttaaaacctatcaagctatcaaataagaaagcggaagaccaacaagaaaaagagaaggcggcaaaagccgttgaatcaccttcccattaatagagcaccccgcgggtatcaatccgcggggttttttattcaatcatctgggctcttccatttccgaaagaccaatcctcagcctgatttccggccagcatgataaacacatcttcttttcttacaccaagctcggaatgaatccggctcgcgattgagcggtaaagtgcttttttctgttcagttgttcttgactgtttcagtgtaaaatgaatgtatatcagttcatcagtacgctcgacttggagataaaatggatcataaaaaaattcgcttttttcatattgtctgatgacttggaaatagtcatcttccggcacattgatttcttcaatcatcgattggtggatagtcctgctcagtttttgaagccacacttcgcttcttcccgaccgtaaatgaatctgtacaaatggcatctccccgcatccctttctttacagcgtctgtccgctgtcaattgtgataatttggcctgtgagtgattcctgttcaattagtgaacaaatcaatttggcaacatcatctggttcagcaatacactgcagcggcaaagagccgatcatgcttttcattttttcttcccgtccggcccaccatctcgttgccacagctcctggtgctacaccgctcactctgatttcaggcgctaaggcgtgggccaatgatttcgttaaaccgtgcaccgctgattttgatactgcgtaaggcatagatgagccgacaccagttatccctgcgatgctgccgacgtttacgatcgccccggccttgcttttcttcatgaacggtaccactgctctcgcgcaaaaaaacatccctttcacattgacggcatacagctcatcccagacgtcttctgtcgcagcctcaagatcatccattggaatatgccgtgtaatgcttgcattgttgactaaaatatcaaccgtgccgtgtgtgctcacgattgcttgaatcatatcctgcacgtcgctgtttttggatacatctgcttggatggcgaaggcttgcccgccagctttttgaatcttttccactgtttcctccgcttctgattgcgagcgtgaataattcaccgccacaatcgtcccgcgctttgccaattccatactggctgcttttccgattcctgtgccgccccccgttacgagagctattttgttcaagacattcattgccgccactccttgctgttgactaaagtatatttctgattccattgtaatccagctttgatgttacgtataatgattgttaaagatactagatatcactcagattgatagtaaacgaacggaggagttcaaaatggaaagcggagatttacgtgtgtttcaaatggtagctcgtgaagggagcattacgaaagcagccctgcagcttggctatgtacaatcgaatgtcacggccagaattcaacaattggaagctgagctgggtaccacactgtttttgcgccataatcggggcatgacactttctgcaagcggaaaattgctgctggactacgcaaataaaattataggccttcttgatgaagcgtctaaagcgctctcatcctccgcagaaccaagcgggccgcttatgatcggctccactcagacaaccgccgcggtaaggcttccaaagcttctggcatcttattatgaagaacatccaaacgtccagctgtctttaacaacaggacatacgcaatttctccttgataaagttcttcgttatgaattggatggcgcgtttatcggatgcgaatgccatcatcctgagctcgaatcctatcctgcgtttgaggaagaaccagtagttgtttcggctgcctccgtgcccgatgttgaggaagccatcacaaagccgattctcgtttacagcacaggctgttcgtatcgagaaacacttgaaaaatggctgcgctccgtcggtgtcacacagccggtcattatggaatttgggacgcttgaagcaattatcggcggggttacagcaggtcttggcatctcgttgctgccaagaacggttgtgcagaaacatgaagcagaaggatcaattcgattgtacccgctgcctgaagcgctcagccagatgaaaacagagtttattgttcgaaaagattcgtttatcagcagcgcgctgagaacctttatggattcctttacgccagataaaacggctgaatcacaaaaaagcagtctgctataatgtacagactgctttttggctattgtttgtttcgatgcgcttcatttaattccttaatatgctgaatgatctctttaatgccctgctttgcgtcggggtatgtcgcattccaatgcttagcgagcggtggcatgctcttggctatatgcgtgtacaaaatccattgcttcacttcttcttttagctcatcgtttgtctcaccaagcagaagctcagtatacttctccagcaatccatccagctgctcctgaagtttttgttccatttgccatcttcctttcgaaaaaacagcaaggagctttctcaattgaaagctccttcgctgcgttatttatccatgtgatgtgaaagccgcttcctggacaatgcatctgcccctgccatgaggaatgcaaagaggcgttccgaagagcgggtcctgtgtaacctgacagttcatagaaaacacattttgcacaagatcacaagtgatgacctcttccggacggccttctgcataaatccgtttatcttttatggccacaagatgatgcgcatagcggcacgccaagtttaagtcatggagaaccataacaatcgtccggccttccttttcattcagctcaaacagcaaatcaagaatttcaatttgatgcgtcatgtctaaatacgtcgtcggctcgtcaagaaggatgatatccgtttcctgggcaagcgtcatcgcaatccaagcccgctggcgctgtccgcctgacaaagaatcaacggcgcggtcagccatgtcctcaagctttgttgctttaagcgctctttcaactgcttcctcatcctcttttgaccactgcttcagccagttttggtaaggatatcttccttgcttcaccagctgatgcaccgtcagcccctcaggagccgaaggaccttggggcaggattgcgagctcttttgcgacttccttcgtcggaagcttggcaatcgctcttccttccagcagcactgaaccgcctctcggcttcatcaggcgcgctaatgaacgtaaaagtgtcgattttccgcagccattgctgccaataaatacggtaatttcacctttgggaattgttaaattcaactcatcaataataacggcatccccgtatcctaagctcagcgtttctgtagaaattgcactcatacccataaccgctcctttttgctggctttttagcagcactatgtattgcacgttttctatatacatgcttttaagtcaattatcatcaatgcaagtgattccgatattcagccatttgatatggtcatatatccctcattgtagcagaaaacactgactttgaaaatcattttcaattagttttatggacataattgacgtttatgggttttttatcacaagattacttcttgatttctctgatggagccgtccttcagcttcaattttaaatcgatatgatcataatgactgtccagattaaatgctgccagcacactgtgtatcacttctgtttcagccatttggtctgtcacggaaagctcgctcaaaatcattttcatctcatccaatgcttcttctccctcctgattgacaccggagagcttatcctgtatttccgctttttcctgagttccgttctttgtatagattccttcataacggttatgctcaccatccccgtagctcacacgaagcgaaaaattactgtagggaacggacttcagctgggtgacggctgtattttctccttctgcctgctgctggtcttcattgagacggcagcccgcaatcagaaccactgcgagacatacagccccggctgctctgaccaaatgcatatgtttcccccctgtaggattccatttattttaggtatatccagagaatgaaatcctcattcagagaagaattgaaaaagccggggcatttaacgccacggctttttctttaagattcggtcatttgtaaaaaggtttcggcgtcacgcacagccagcttgatggcattctcccagaaatcgcgctttgtgatgtcagcgcccaaatgcttcatcgccaaatcctccactgtcatagaagccgtatcgcgcaatagcgccatatacttctcttcgaatgtgtctttttcttcaagcgccaacgcgtaaataccaagagaaaacaggtagccgaatgtataagggaaattgtaaaacggcaccctcgtgatgtgaaaatgaagctttgatgcccaaaaaagcggatgatattcttctaacgcattgcagtatgcctctctttgcgcctcttccatcagctcattcaagcggctggccggtaccactccccgctttcgttcctcgtagaatctcgtttcaaatagaaatcttgcgtgaatgttcatgaagaacgcaacgcttctttgcactttatcctccagaagaacaagcttttcttccctcgtctcggcctgctggacagtcgcgtccgccactatcatctctgcaaacgttgaagctgtttctgcaacgttcatggcgtaggaacggtttaacggcctgacgttgagcattgcttcctgatggaacgcgtgcccgagttcatgcgcaagggtagagacatttgaggcgcttcccgaaaatgtcatgaaaatccgggattccccgctgtccggaaaactggtgcaaaagccgccgactctttttccgctcctgtcttccgcctcaatccagccgtcccgaaacgctttttcagtgaatgaggacagctttttgccaaacgttgaaaactggctggtaatgatatttgcggcttcatcatacgaatagacctttccgtcagaaccgatcggtgcctcgacatcgtaccagctgagtttttcaaggccgagcatggatgctttccggttcaaaaactgaacgaacggcttcttgttttcagtgatgacctgccacatcgtatcaagtgtttcttttttcatcctgttaatttgcagcggttccttcaggacattctcccagccgcgcgctttataggtttcaagccggaatcccgccaaatgattcagcgtgctgctgaaaatatcttgcttgctctcccaagcttggcggaaacgttcatatactgtttttctgacagtacggtcttgatgatccatcatattctccgcctgaccgacagacaattgcttgttttcaccgttttcctcatacgggatcgtcattttcccgacaaccatattgtataagtcactccaagcgtgatatccgtccaccgcaaggtttccgatcagtttttccttaccggggctaagcttttcggcaaccctctgtcttctttcatttaatatgtaagaaacatcgcgcaatcccggttttgttaacaattcattccacacgtcttgattaatgtccacaagtttatgatctaatgtaacgagcgacgattgaaaatctgcggaaagccgattcatgagtgcctgatgctctatagccttttgatcattgatattctgggcctggaggcaagcaacaaaagcgccggcctgctgaagcttgacggatgtctgttcgaataaatcaagcaacgcggtcagcccttcagcctcttcaggcgattcaggcacctgaaacgcatcagtcctgtcttgaaatgcacgcagactttgtgacagcttctcaatataacctttgaattcttccgattggctcccgcccttaaaaaatgaatcaagatcccatctttggcctaccccttgcagcgccatatcacaaaacccctttccttctttcgttctattatagaacaattctgaattattgtataaaaatttctattacaggcgtcatttcgtgttcaggatagtacaatagctgtagcagtttaataggagggttaggatgaataaaaaaatagccatcgtaacaggagcgtccagcggcttcggtctgctggcagctgtaaagcttgcccgatcatttttcgtgatagccacatcaagacagcctgaaaaagcggaacagcttcgagaattggctgcagcacacaatgtgtctgattctattcacattacagctctcgatgtcaccgatgaacaatctatagtctcattcggaaaagctgttagtgcttacgccccgatcgatttactcgttaacaacgccggaacggcttatggaggatttatcgaggatgtgccgatggaacatttcagacaacaatttgaaacgaatgtcttcggtgtgatccatgtgacaaaaaccgtgctgccttacataagaaagcatggcggcgcaaagattataaacgtgagcagcatcagcggactgacaggattcccagcgctgtcgccatatgtttcttccaagcatgcattggaaggtttttctgaaagcctgcgtatcgagctgcttccgttcggtatcgaaaccgctttgatcgagccgggctcatacaagacatcgatctggtcaacgtcattatcaaattttatgtcggtgcctgctgacgattcagcctatcatcaatactataaaaagatcctttcctatgttcaaaaaaacggagaagaaagcggagatccccaagaggttgccgacctcatttatcaattggcaacaaaacagcacataaagaatttgcgatacccgatcggaaagggcatcaagctcaccctgctgttccgatcgctttttccttggtctgcgtgggagtctatcctgaagaaaaagctattcagctgatctaaattataattattataatttagtattgatttttatttagtatatgatataattaagtcaacagatcacaaggaggacgttatcttatgaaaactgaaaacgcaaaaacaaatcaaacattagttgagaattcactgaacacacaattatcaaactggtttcttttatactctaagctccaccgtttccattggtatgtgaaagggcctcatttctttacattgcacgagaaatttgaagaactttatgaccatgcggctgaaacagtggataccatcgctgagcgcctgctggcgattggcggacagcctgttgccacagtgaaagaatacactgagcatgcatctatcacagacggcggaaacgaaacatcagcatcagaaatggtacaagcattggtaaacgactacaaacaaatcagcagcgaatctaaattcgtgatcggcctggctgaagaaaatcaagacaatgcgacagcggacttgtttgtcggattaattgaagaagttgaaaaacaagtgtggatgctttcctcttatttagggtaacaaaaaagctgaaccttaatcgggttcagctttttgttttttcttagcttgaactgctttctgtctgcttggtcagtgttgcgttcaacgttttcgtttttccctttcgcagcacttggattgttgttttatctccgacttttaagtctttgtaaaggatctgacggatatccgcactgctttccacgtctttaccgtttagtttgacaatgacatcctcagatttaatacctgctttttctgccggcgaatttgcttgaacttcttttacataaacacctttgcccaattgatctccaaacaggccgagcgtattttcctgataggtttcaggaacttgtgacatgtcaatcatctgcacgcctaaaaacggacggtccaccttcccgttttgcagcagctggtcaacaatcggctcgacatcattgcttgggatcgcaaatccaagtgattccacgccgctttcgctcaccttcaagctgttgatgccgatgacctggccgcttgcattgattaatgggcctccgctgttccccggattgatcgctgcatcagtttgcagcacgttcatttccaccgtcccttgtgttgtatccacatcaattgtccggttcaatccgctaatgatgccttgtgtcaccgtaccggaaaactgctgtccgagcgggttaccgatagcgattaccttttcgccagtgcgcagctgtgaagagtcaccaaagctcgccactttttttacattcttgccgctgatttccaaaactgccaaatcagtaatggtatcgctgccgacaagcttggcagtttccgtttctccgttgtatagcgtaacagtcagcttgttcgcgccttcaacgacatggttgtttgtaatgatatacgctttatcgctgtcttttttgaaaataacacctgacccggttccgctttcactttctgagctggagcctcctcccgtgccgaatgtgttattttgagaggtttggatatttgagattccgacaatcgtaggctctaaatcctctaccatatcagcgatgtttgatgcgttcgttatcggcgccgttgtaaaattatcagactgcacctgtttatttgcggaagcggattcggtcgcctgattttggtctgacggcagataaggcgcgatgccaagcatgaggcccccgccgataataccgcctaaaatcgggctcagccatgcggctctccgtttcttttcttttttcacagccgtttcttgcttttccatttctagtgcagaagccgtttcctgccgtcccgcttcatatgacacaggcgcgtcaagcaattcttgttcagaatgtccaatcagcttctggttttctgtattctgctgttctgtatgtgaaggttcagtttgatgttgatcgttttggccatcacgtcgataatccatgttcttacactcctttaacggttattcatttatcgttacatattcatcgcatgtacaagttcaattgtcccaataatgaggagaaaagcaaagcaccaaaatagaatatgtttgatcatcctacatcttcctcgctctttttctcttcctttcttcccttatacatatcataaacaaacattgtgggataaaaatgaaaagaatatgtgaaattatgaaaattgcctgccgtatgttaaaactagtttataatgacgttgaaaggatgtgaagagccttgtcatacaccatttatctagttgaagatgaggataacctgaatgaactgctgacgaagtatttagagaatgagggctggaacattacatcttttacgaaaggtgaagacgccagaaagaaaatgacaccgtctccccacctatggattctcgatatcatgctgccggataccgacggctatacattaataaaagaaatcaaggcgaaagatcctgacgtgccggtcatttttatttccgcccgagatgcggatattgacagagtgcttggcttagagcttggcagcaatgactacatttcaaagccgtttctgccgcgggagctgattatccgtgtgcaaaagctgctgcagctcgtatataaggaagctcctcctgtccaaaaaaatgaaattgccgtctcctcgtatcgggtcgctgaagacgcccgcgaggtctatgacgaaaacgggaatattatcaatttgacgtcaaaggaatttgatctgctgctattatttatccatcataaagggcatccatactctcgtgaggatatcctcctaaaagtgtggggacatgactacttcggaacagaccgggtcgttgatgatctcgtccggagactgcgcagaaagatgcctgaattgaaggtggagacgatttacggtttcggctacaggatgatgtcatcatgaaaaacaagccgctcgcgtttcagatatgggttgtcatatccggcatcctgttagcgatatcgattttactgcttgtgttattttcaaacacgctgcgagattttttcactaatgaaacgtatacgacgattgaaaatgagcagcatgtgctgacagagtaccgcctgccgggttcgattgaaaggcgctattacagcgaggaagcgacggcgccgacaactgtccgctccgtacagcacgtgctccttcctgaaaatgaagaggcttcttcagacaaggatttaagcattctgtcatcttcatttatccacaaggtgtacaagctggctgataagcaggaagctaagaagaaacgttacagcgccgacgtcaatggagagaaagtgttttttgtcattaaaaagggactttccgtcaatggacaatcagcgatgatgctctcttacgcgcttgattcttatcgggacgatttggcctataccttgttcaaacagcttctgtttattatagctgtcgtcattttattaagctggattccggctatttggcttgcaaagtatttatcaaggcctcttgtatcatttgaaaaacacgtcaaacggatttctgaacaggattgggatgacccagtaaaagtggatcggaaagatgaaatcggcaaattgggccataccatcgaagagatgcgccaaaagcttgtgcaaaaggatgaaacagaaagaactctattgcaaaatatctctcatgatttaaaaacgccggtcatggtcatcagaggctatacacaatcaattaaagacgggatttttcctaaaggagaccttgaaaacactgtagatgttattgaatgcgaagctcttaagctggagaaaaaaataaaggatttattatatttaacgaagctggattatttagcgaagcaaaaagtgcagcacgacatgttcagtattgtggaagtgacagaagaagtcatcgaacgattgaagtgggcgcggaaagaactatcgtgggaaattgatgtagaagaggatattttgatgccgggcgatccggagcaatggaacaaactcctcgaaaacattttggaaaatcaaatccgctatgctgagacaaaaatagaaatcagcatgaaacaagatgatcgaaatatcgtgatcaccattaaaaatgacggtccgcatattgaagatgagatgctctccagcctctatgagccttttaataaagggaagaaaggcgaattcggcattggtctaagcatcgtaaaacgaattttaactcttcataaggcatctatctcaattgaaaatgacaaaacgggtgtaacgtaccgcatagcagtgccaaaatagactgtagatgttttgcagtctatttttttatgtgaaagaatagccgttaaaatctctgtaatttgttttgagcggctgtttgcattgatgaacccattttttctctgacaaggtctgcttcggatatttgactttctccactttgattcctctgtttcgcaagcggctgatcatttcgtccaattctctcattctagattcaccctttcgcttgagctttgaccattcggtcatctcaatttataatataaataatacatgataaaaaaacaagttacaataaggttaattttataacagacggtgtgactatatggtcatatcctagcaggcctccgggctccgaaagggtggaaccattgaaggaaaaagaaaaactgattattgaaacagccttaaaactatttgcccaaaaaggatacaactcaacatcagtccaggaaatcgcaaaagaatgcaaaatatctaaaggcgctttttatatttattttccttcgaaagaagcgcttcttctctctatgctgaactactattatgataaaacgtttacccgaattttaaatattaaaacgaagggcgacagccccagaacggcttaccgtaaacagctgaccgtcctctatgaaaacattcttgaacacaaagattttatcagcatgcagttgaaggagggttctctgccttacacagaagaagtggagcaatgcgcaaaaaaaatccgccagtcctcacttcaatttcatatcgacagcctgctgaacatctatggaaaaaaagcggaaccctacactgctgagctttgttttttaatagagggcatcagccagatttacctggaatgcatgattttgctcgggtacactgtgaagccgtctcaattagctgatatcattatgaatcgaattgatgatatggtaaaaggcatgtctgaacgaaacgataagcctttcatcacattggaagaggcgagctctttattcgggcctcttacgcacggacggcctgacccgctgactgaatcaattgtgaaaagcctacgtgacaaaattaacagcttaaacacaaactcctctcttgaattatcggagagcttggacatacttgaagcagaaatgaagaaaaaaacaccgaagcttgcgatcataaaaggaatgattcataatctgacggagtctgaagctctcgccaaagatgcggaacagcttaaatatttattaaaacagcaacatatttagaagaacggctgcttaaaaagcagccgttctttcttcctattacgcctttggttttaccatgtcttccggcttaaccatttcgttaaattgctcctctgtcagcaattcaagcttcaaagctgcttctttgagcgtcaatccctctttatgggcaagcttggcgattttcgccgcgttttcataaccgatatgcgggttcagcgccgtaacaagcattaatgaatttgacaggttttcctgaatggtttctttattaggctcaataccgacagcacatttatcatggaatgaattcatgccgtcactgagcagctgcacagattgcaggaagttgtaaataataacaggcttaaacacgttcagttcaaagttcccctgacttgccgcaaagccgattgtcgcatcgttccccatgatttgcgctgcgatcattgttaacgcttcgctttgtgtcgggttgactttaccaggcataatagagcttcccggctcattttcaggaatgacgatctccccgatgccgcagcggggtccgcttgcgagccatctgacatcgttcgcgattttcattaagtcagccgcaagcgcttttaatgcgccatgcgcataagtgatttcgtcatggcttgtcagcgcgtggaatttattcggcgagctgctgaacgtttggccggtcagcttagtgatctcttctgagacaagctctccaaactctgggtgagcgttgatacccgttccgacagccgttccaccaattgcaagcgcacgcattttatctgtcgcttccaaaatcatttccttcgaacggtccagcatgtgaacccatccgctgatttcctgtccgagggtcagtggcgtagcatcctgaagatgcgtgcgtccgattttgacaatatcattgtatgcttttgctttttcatccagtgtattgcgaagctgatcaagcgccggcacaagctgctcgtaaacagccaaaacagcggcaacatgcatcgcagtcgggaatgtgtcgtttgagctttggcttcggttcacgtcatcatttggatgaatcgtttgatcagagttcttctcttttaataaagcagtcgcacggttggctaccacttcgttcatgttcatattgctttgtgtgccgcttccggtctgccatacgacaagcgggaagttgtcatcgtacttgcctttgagcacatcatcacaaaccgctgcaatcgcttctgctttttcagcgtccagattgccgaggcgtttattagctagagcagtgcttcgttttaaaattgcaaacgccttcacaacacgcatcggcattttttcagaaccgatcttaaagttctccttgcttcgctgtgtttgggcaccccaaaatttatcagcaggaacttttacttctcccatggtgtctcgttcaattctgtattccatttatgtatccctccataacggttgcttcaatagatcataattcgccaatgacacaaaaaatcctttttatttttcgatcttggcagattttaattttaattcaagatatacgcgggaatcctttgaatatttgtattttggatttgtcctgccgtactcctttgatgtataagagacatcataatgctgttcaaatgatctaatgagctgttcaatttcttcttgttttccagctagccttacctgtgccacttcgtatcctccgctttcataaaaaaacttactccatgaaatactctaacacagtatatcatttttttaacaggaaaagataacctctactaaggttttggataagaggtgacctcattggaacaaacagagtttaaggaatatatacacgataatttagcattggtgctgccaaaattaaaagaaaacgatgatctggtgaaaaacaaaaaaatgcttgcgaacggactggttttttactatctctatttcagtgaaatgactgatgagaataaggtgtcagaagccattaaaactttgattaaagatgaggagaccttaacgcttgaccaggtcaaaaaacgccttgaccagcttgacgcaagacctgttgaaactgcaaaaaaaacgattgaatcgattctcaacggcaattgtgctgtgtttatcaacggattggataaagcctatattctgaccacaggaaagaaaaaaacaagaagcctgacagagccgacaactgaaaaagtggttcgcggcccaaaagtagcgtttgtagaggatattgatacaaatctcgctctgatcagacaaagaacctctcatccgaaattgatcaccaaaaaaatcatgatcggcgaaaacaagctgaagcctgcagccattatgtacattgaaggcaaagcaaaaaagtccgtcataaaagaagtgaaggcgcggcttaaaaatatccagctggaagatatccaggacagcggaacgctcgaggagctcattgaagataataaatattcaccatttccgcagatacaaaatacggaaagacctgacaaagtatcttcagccctgtttaacggccgtgtggcaattttggtcgacagttcaccatttgtgctgctggtgccggtttctctcggcatcctgatgcaatccccggatgactactatgaacgctggatttcagcatctcttatccggtcgctgcgctttgcttctatctttatcaccttgtttttgtcatcgatttatatagcacttgtttccttccatcaggggctgctgccgaccgcactcgccgtcacgatttcggcgaacagggaaaacgtgccgttccctccgatatttgaagccctgctgatggaagtaaccatcgagctgctaagggaagccggactgcgactccccaatccgctcggacagacgatcggcctcgttgggggcgtagtcatcggacaggctgctgtagaagcgaatctcgtcagttcgattatggtcattgtcgtcagtgtcattgccctggcatcctttaccgttcctcaatacggaatgggtctgtctttccgggtgctgcgttttatttcgatgttttccgccgctattttagggctatacggcattattttatttatgcttgtcgtttatacgcacttaacgagacaaacgagctttgggtctccgtatttttcgccaaacggattctttagcctgaaaaatacggatgactccattatccgtctcccaattaaaaacaaaccaaaagaggtgaataatccaaatgagccaaaaacagactccactgaaacttaatacctttcaaggtatttctattgttgcaaatacaatgcttggggccggacttttaacattgccgcgagcgctgaccactaaggctaatacgcctgacggctggatcacgctgatattagaaggtttcatttttattttcttcatttatttaaacacgctcattcagaaaaaacatcaatacccttcactctttgaatatttgaaggaagggcttgggaaatggatcggcagcatcatcggccttttaatctgcggctatttcctcggcgtagccagcttcgagacacgggcaatggctgaaatggtgaagtttttcctgctggagagaaccccaattcaagtcattattttaacgtttatttgctgcggcatttatttaatggttgggggcttaagcgatgtgtcgcggctgtttcccttttatttaacggtaaccattattattttgctgattgtgttcgggatcagttttaaaatttttgatatcaataatttgcgtcctgttttaggcgaaggccttggacccattgcaaactcccttaccgtcgtttccatctcttttttaggaatggaagtgatgctgtttcttcctgaacatatgaagaaaaagaaatacacgttcagatatgcgtctctaggatttctgattccgattatcttatatatccttacgtatattatcgttgtcggagctttgaccgctcccgaggtgaaaacgctgatttggccgactatttctctctttcagtcctttgagcttaaaggcatatttattgaacggtttgaatcctttttactggtggtctggattatccagtttttcaccacatttgtcatttacggatactttgccgctaacgggctaaagaagacatttggattatcgactaaaacaagcatggtgattatcggcataacggtcttttatttttctctctggccggatgacgccaatcaagtcatgatgtatagcgattatcttggctatatttttgtctccctgtttctgcttccgttcattctctttttcattgtagctctcaagaggaggattacaacaaaatgaaaatccggattttatgtatgtttatatgcaccctattgctgtccggatgctgggacagtgagaatatcgaggaattaagcttagtgatcggagtagggctagacaagcctgacgatgaaaatttagagctgacacagcaaattctcgtgccgaaaataatcagcgccaaggagggctcttcatctgatccgacacagctttctatcacaaagggtaaaactgtccatcaaatgatgagaacctctgcattaaagcataagcctacgttttcacagcatttgcgtctcattctgctttccaaaagcgtgattgcggatcaaattggaatggacgccattattaaccagtttgtcagagacaacggaacaaggaggagttcctacgtctttatcaccaacggccgaactaaggatatatttaacatgaatgatgaaggcgaacccgcatccaacgtgatatatgatctgacagagaataataaggtgacgatcagaacgatggagccagttacattgggggagatctcagaacacttaacctctgacgattcattcctcatccctcatgtcggtaaggaaaacggcaagctcgcgataaacggagcctctatcataaaaaataaattatggcaccgggacctcaccccgattgaggttcaaaatatcagcttattttcaggcactgtcgagggaggcgtcattgacttgaagcgcgatggccatctcttttcttatgaagtatattcaagcaatcggaagatcaagacggcatacaaggacggaaagttcaaattcaccgtcacccgcaatattgaaggtcgtctatctgaggactggaatcccaatgaagactcgtttaaggattcatatattaaaagtattgaaaagacagtcgaaaaacgagtacacgaaacagtaacgtcatttattacagagaagctgcagaaagagatcaaagcggacgtaaccgggctgggaaacgaggtcagaattcattatcctcaaaagtggaaaaagatttcaagaaaatgggatgatgattatttcagcaatgcggaaatagactaccgggtcaatgtgattgtcagagacttcggaacgaaaggcgcaaacaaatagcagccgcctaattcacgagatgatttcggtgcgcgtacaccgccgcctgcgtccggtcactgacatccagctttgataaaatattcgtaatatgtgttttgactgttttaatcgtaataaacagttcctcgcctatttctttgtttgtctttccttctgcgatcaggcagagtatttcgagctcccgttttgtaagcgattcatgcgggagcgcgttttcacctgagtggcgcagcctggataatacttttcccgccacttttgactccagcttcggctctcccttgcttgcggcgcggatggcatcggcgatttctgccgcttttgaggttttcaacagatagctgagcgcgccagcttcaataaccgggtacactttgtcatcatcaatgaagctagtgagcacaataattttcgggtcggaaagctcccggcaaatttgctttgtagcttcaatgccatccatgccctccatgacaaggtccattaaaatgacatcaggcgacagttccacagcaagccgaacaccttcgctgccgtccgatgcttcgccgatgacttcaatatcgggctgcgcctccaaaaaagccgcgagccccattctgaccatttcatgatcatcaatcaataatactcgaatcacgttcgttctctcctttttcttccggaaaaatcgggaccttcacttcgatttgagtgccttttccttctactgaaatcacttcggcgacaccgccgatttcacttgcacgttctttcatagaattcaagccgtatgaggaggctttcacctggtccattttaaagccttttccattatcaatcaccttcagacggagctggctgttctttatgcccagaatcacggttacttttgacgcttttgaatgtctaaatacgtttgaaagggcctcctgcacgattctgaacaagtggtcttcaacacccttggatatcgctgtgtcctgtatatcccactcaatatcaatcggctgcttttttcggaactcgtccaaaagctccgtaaggccctccttcagcccttttccttcaagggtaacaggccgtaaatggagcagcagcgccctcatctcattttgggcttcgcctgccatatgctcgaccatcttgatccgcttgactgttttgtcatcagcatccttgacatgttccagcacggctgatgtcatcatcgatatggcaaagagctgctggctgaccgcatcatgaagatctctagccaatcgctggcgttcttctgagataaccgacttcttcatttgagcctgccattccgcacgttcattggaaagtttctgcagggatgcgacttgaagctccacgcgcttcgccatttcgttcagctgatcagcggccaggccgatttcatcatcaccgagcggaggtatccgataagcgaaattgccgttttcaaaggttaaaatggattcaattaatgtatcaatccttgtcttcaaccggttgccgtacatataccctgaggcgaaaccgactgtcacgctgatcagaagcaaaatcaggataaacggaattccgaaccagcttgatgacagcaaaacaagcggatcgagccgatagtaaaacatcataaaggaaatcaggcaggcaaaaaggagcaggctgattcccgttgtcatgcggatggcgcgccattggaggctggcaagcattttttttctcatacgtacttcacatccacatcaccgataaataaggaaacggacacttttacccggcgctttgactcgctgaaatcagttgacgcggcatataccttcgtgcttaatccgcttttcttcgagccgatcagattaatgtcacctataaaaacagctgagctgacagccacttcaaggtccgatggtacataaatatcaacgttaccaatgactccgctaatgacgattgtactttctccctcgggaatcattgctttagataaatcgattttgatatcaccgataaaaccagagacatttaaatcattcaggtcaaacggctgcttcatcatttgcagctcaccgataaaaaagctgcgcatgtcgggatgttttacatcttttggcggatcatgatgttcttttttattgagattgacctgtttctcattcggttcaaatatcggcttccctttgataagcctgtagccggcgtaaatcagaaatgcggcaaacgcatagccgaataaattaaaggtgatgctgaagaggtttttcaaaaatagaaacgcggcaaagatatacatgacggagccaagccaatcacgggaatattttttaaggaaatagccggcaatcagaaaaaagagcggccaaaacagcagatcgcctattccgataatttgcaaaaacatactgatgccgaataaagcaatgatcaatccgagaagctgtttttttgtcattcctggtgtccgcctcctttcttctgcctagtgctaccgtatcgctagatccccgctgtccgttttgatgtcgattggatgctggccgcttccttgcgtgcctgtgatgtgatgctgttctttatgtgctttatcagcaaatgaatacggcgaactgacgtcaccgcttgctgataaagcattgactgcaaagctgccgttttggggaaggcttacattagcatcaccgcttgtcagcgtgacagatacgggaccggttacctttttcaatacagcattaaaatctcctgaagtcattttcacatcaagagagcctgatacatgaaccagatttgcgtcccctgaagctaaatcaatgccggctgttttggagacggtatttgaaatggaaacatcccccgatgatgccttcactttcagatcttgaatgcggacgtccgtcacgctcgtatttccgctcgcagatactgcgttcagcccggaaagcgcaagatggtcattcccggccacagacacgtcaccgcttgaggttcgtactgccagatcacctttataatcatacggaagcctgacgataagagttgaacggttaaatccattcaaaaattgaaattctttttcctttacggtcagctccagttttcttctgttttcagtaacaaataactttcctgagtctcctgaaatgcctgccgatatgtcacttcgttcttccgctataatccggacatccttgctatccgactcaatgaccatgctgtcaatgtcccgcggcgatgcgctggctgaatcagcttctgtgccatttatgaaacccaggcctgcagcaaacacatcttttacgacaacagcgaaaaaaaccagaataccggcagtgatcaacagtttgccaagcatttttttcattcggtttcatccttctcattcattctattataaaggaaaagcttgcgaattgatacgtgcggaaggggaaggacttgaccgcaaatccttccccgttccgcttattcatttgccgcttgtgtctggtctgatttttgcagtgaaagtgtccgcattttttcaatctccgcttctacatcgtctgcgaattctttacgtgtaagttctgtgccggcttccgctgactttgaataattcgcgcggatttccatttcttcaatacgattttcaatacgcaaaaattcacgatacgcgctttcactgtcaattttgtcaaatgtggtattcatatgctctttagctttcgccgcatttgcccgcgcaatcagcgcctgttttttatcctttacgtcctgaagctttgtttcaagtgcagccagttgctctttcagatcggccagctgactgtttgcctgttcataggaagctttatgctcagccgcctttccttctaaatacttcatttcagtcagcgcctttttcgccagttcttcttcacctgcgtcaaatgcgagctgtgcctgatttttccgttttccagccacttcagcggcttcttcatattttttcttaaattgataggcaatggtgtgctgtttcacaattgtttgctttgcttttgcgatgtcgctttccatatcgcgtacatattgattcagcatcacctttggattctccattttatcaagtccttcatgaactgacgcaacaaacatatctctgattctttttaataccatacctaattcctcctaatatattgatattattttttcttcaaaaattcttcccattcatcatcaaagtgagattggtaggcagcagaagccggttcaggatcaaaagatgatacaccgttatcagctgatccgtttttcatcagcttccagccgtaatacaccatagcggccgccaatgcgattccgacgacaaacggaagtgagcagatgagcataatggctccgataccgcccacgatgattcccgtgatggtttttcccgcggcaaaccttttgactcctgcgtatgtcatcaagctcccgatggcgagcgggatgataaagccgaagcttcctcctccaaaaaagacggatatcccaaatacaattaataagaatccgcctatagttttcttgttgatcttcatgcagatcctcctttcgttttccttgtcttcatcttatacaagttagaagatatgcaaaacgaatcagagattgatttttatataagaccggagtcgtatctcggacaggacccatcggcacaaaaaaacgccatgcacgaggcatggcgttttaaaaccctttacagatgaacacttgcttccctttctttaatcaggtcggacctttctgctttggccagttttgtaaacagcaagattccgatacccgcaataatttcgacaatcccgccggcagcaatcactgttcctgagccgaaagcattagcggcatacccgcaaatgacagctccggcagggatcgaaatatttgagatcatatgtataacggcgtaaacctgcggctgatcctcactatccacagacgtctggataatcgtgtactcaggaacattaacagcactgactgcggcaccaaaggtaaaagcagcgaaaaagacgagcggcaaaaaggtattcatccctgtaataaagaaagcaaatccttcaataatgccggcagtgacgaataacaagccgtacctgtttaccttgactttcgccagcacaaaccctaataaaaacgcgcccgcggcggtggtggcctttaaaagcgagtatacgatcggctggccgtttaaatcttccgcaacgtatacggcagagagcgcttcccatggggcagccgcgaaattcataaagatacagtaaatggcgagcggatataaaatctggtgttttctgacgagcctaaagccgcgtttcagtcttccgatatatgtgcctctctgtgtaacaaccgcagactctgattgagattcaaccgcagtgtacttaataaaaagaacgagaaaacctgacaccaaatagagcacaagtgcgataagcatggtataagaaggactaataaatgtaagaaaagcgccgcataatgtgacagccccaagccggacaatttgagcggaggattgcagcacagcgtttgctttttgaatgccctgttcattgacgatttgaggaatcaaagcgatagaggcgggattgtaggcagctccagtagctgaatgcacaatcataagcgtcatgacaaaccacagcggagagaagcccgcaaaatgacatagagggataatcaaaacaatcgccgcccttgtcagatctgaaaagtacatccaaaatttcagcgtggtctgtttcataaaaggccccgtcacaggcgccagaacggcttccggcaaaaacgtgacagcaatcaataaagcagtgccgatcgcacctttgccgtcataaattaaaaaccataatattgaattaaatgcgaacatatcgccggatatcttgactattcttgagaaaaacagataattgaaatttctcttccagatgctatcactttcaattaaattcaccatccatcagagccccccgttgcctattttttacatctatttattacaatatctcatttttccatttttcagtcaataattcataaggttcattttttgtcgtaaaatgggaaattgacagagtgaaaaacaaaaaaagccggcatgtatttgaacacgccggcttccttttcactttttatgattcgctgctgtttcggtcccgaaacacaatggcacttctttcatattctacatcgccaataccgcttcttgcattcacaacccgtgcggcggcaaagaaataatcggacagacgattgagataacgcagcactgtttcatgaatctcctccgatttcatcagcgccaccactcttcgttctgccctccttgtaatggtgcgggcgatatggagaagcgaagcacctcttgatccgcctggaagaataaatttcttcagttccggcgcttctgctgtataggcatcaatgcgcgtttctaaaaaggaaacagattcttccgttagtttgtagtcttttctttctgtgacgattgccagatcgcctccgcagtcaaacagctcatgctggatggtcagcagctcggctgtcagatcttcaaagccgggctgcccggaaagctctgccaaagcaagcccgataaagctgttaagctcgtcaatcgtgccgtagctttcgacgcgtaggctgtccttgtccgttctgcccccgactaagcccgtttgtcccttatcgcctgtttttgtatatagtttcataccctgaatctcctttacagacttattcaaacaactcagcagcctcttttacacattcagctgtccctttctttatcaattgattcagccgctgttctatgttttcggattgctgagtttgagtcgcggcgatgagaatatcacctgtgcctcctccgtctcccagcactttcgtccgttctgcttcggcagccataagagctttgatgaagaattgatctgccgcatagccgtttatcaaaatccaaatcgaaaagccggtctgaacgcatatgaaaacggataactctctgtcttcatacgttcgatacacgaaacggtcaagtctttctgaagaagccatcgcacacgtctcctgcagttgaaaaccgctttctgaaagacaggccgtaagtccttctatcggatctggctgatctggcagccgtttatggatcagcgtcctgctccacgaaaaccctgcaccgataggcgtcgaggacaatgttcgaagcgggatttccgtttgcagaagaatgtcatcacgccccgcttggagcaatgcttcaaatgggatagactgccgcttcacgctatctttttcaggctgaatcacaatcatcggtttaggtgagctttgatgaaccaaggcggtgacatctgtatcgtacaccgcctttatgctttgttctgtaacagcatattccggtttttgcttaggcccggcggtaccgtttttcataaacatgagcccatcacagtacaggcttgcggtgttcagatcatgaaaaacgctgacagctgccaatccgctttctctcgtcaggcgtttgatcagatcaagcaggtctttttgataagccagatcgagaaaattagtcggctcgtccaaaaataaaatacgcggctgctgcgccaaagcttgtgccaaatacacccgctgctgttcccctccgcttagttcgcgaatcggcttttgcgcaaaatcggccactcctgtttgctccattgcttcctgtacaatggcttcacccttttcagtctgctgtctgaacagccccgtttggaatggatatctgccaaaggctacagtttcttcgacagtaaaggtgaaggcttgatccattttttgcggcaggacagccatgatttgcgccagttccttcggtttatagtccgccagcagttttccggccagataaaccctgcctttcttggccggcagcgtacctgtcagcaagtgcaaaagcgtggtttttccgcttccattagggccgagaattccaagaaattctcccttctccactgttaagctgacattgttgattaggcggctgtcgccgtatcctcccgacagcccttctgccttcatcataagcttctccccccgcgatgctgccgaattaaaataagagcgaacacaggcgctcccgccaaggacgtaatgatcccgatcggcagttcaatcggctcaatgatggttctggaaagcagatcggctaaaacaagaaaccctgccccaagcaaggcggacaacggcagtaaatgccgatggtccgttccccacaaaagccttgtgatatgcggaatcacaaggccgacaaagccaatcgtacccgatactgccacagcgcttcccgtcaaaagagatccggctattaaaatcatcatcttcctctgctgaacgctgactccaagaagctttgctttatcttctccatatgtcatcacgttcagttcccttccgtttataatcaataaaatggttcccaaaagaaaaaacgggagaaacaaaataacatagctccagcccctcattgagacgctgccaagcagccaatgcacaatcggaagcaggttgtctcctgtcaaggcgatgataagagaaataaatgcgcctaaaaaagagttggtgatgacaccggtcaaaatgagggtggaaacagacatcgaagcatgaacgaggcggctgaagaaaaggaccgccgccatcgtggccagtgccgcggctacactcaaaaccgggagtgtaaaccctccgatgacaggaaggtgcaaacctaagaacagagtcacaacagctccgactgaagcaccggatgacacacctagcgtatagggatcagcaagcggatttttcaacaatccttgaaaagcggcccctgcaatagaaagagccgcccccacaagggcggccagcacaactctcggcagtctgatattcatcataatattagtgtacatcggatcatcagaaccgatagagccgccgaaaccttgatgccaaaagacacgaaaaacagcgggaataggaatatgcaggctgccgcaagaaattcctaagatgatgctcacggctaaaaatgagaaaccaatgatatatgcggcataacgattattccttaaacgtatccgggtaaatgctttccgcaagttcttcgaccccttcgatcagacggggaccggaacgtgtcacaagatcagggtccacatcatatacacgatgatgtttcacagcattgatttcgctccagccatcgcgtttttccacagctttcgctttcacaccgtccgttgtaacaattgcatcaggattgagttttacgatcgcctcgtctgtcatttgcacccatcctgtctgatccgcagctgcgtttttagcatggatgacatttagcatttcattcataaacgtatcttttccggttgtataaatgtcaggatcaggagaaacctcgataaatacgcttttctcctcgtcttttgaaatggttttcgctttttcttgaatatcctttagatctgatttcatgcttttcacgagctgatcggcttttttctccgccccgccagcttctccgatcatttcgattgatttgtacacctcggagaatgattgtgcatcattgacagtcagcactgtaatgcccgcgtccttcagctgtttgatggcatccgctgatgctgacatggaagactcatgggccagaacgagatctggttttagagaaatgactttttcaacgtttacattcatatctccgactttctcaacctttttgacttcctttggataggtatcgtttgtggtgacaccgaccactttgtcaccaaggccgagtgcgtatgtaatttctgtgttgctcggcattaatgaaacaatcttttttggctcttttttgatggttacatcttggtttgacgcatcatcaatggtgacagggaacacttctgttttttgttttgcctttgaatccttctgatccgcaggattgccgcagcctgccagcataacagcagccaacagaagcgcagcccatatcccggctcgttttttcataatcttttcctcctaaacgaactaaaaaagcatctctacgacggtaaagatgctgtaaacaacacaaaaaagcctattgtttacacatcatctgtcctcgcagaattcgtgctgatcaaacaggcaggtatcctggctcttggcgcttggccaattacagtggcgggaccgcaccggcttttaccggtttcccttttaagccggctgttgttcacggaccggcacctatttgacattcgtatccgtttttcggagtaattatactatatgactgacaggcttgtatatgtgtcctgaatgacttttccccatattgtgtatggaagcaaaatcctcgtaaacactaaatttgatcttgtatacttaataccatcatctatcaaaaggaatgattcttatggatttacagctaaaagaaaaactcgtcttaatcaccggctcgacgtccggtatcgggaaagccgccgcaaaaagctttctgcaagagggtgcggcagtcattgtcaacggacgcaaacaggagactgtcgatcgcaccattgaagagctttctggctatggaacagtgcacggtgctgctgccgatttgtcaaaaacagatgaagcagcggcttttatcgaaaaagtaaatgaaatcggtgatatcgatatccttgtcaacaaccttggtttcttcgaggtaaaagacttcgccgatgtgacagatgaagagtggaatcaatatttcgaagtgaacgtgatgagcgccgttcggacaagccgtcacttccttccaaaaatgcttgccaaaaacagcggccgcattttaaatattgcaagtgaagcaggcgtcaaaccgctgccaacgatgattccatactcaatgacaaaaacggcactgatcagcctttcaagaggaatggctgaaatgacaaaaggcacaaatgtgacggtcaactcagtgctcccgggacctacttggacagagggcgtggcctcctatatggaaggcgccgcacaagcagccggacaggatacagatacatttatcaaagactatttcaaggtcaatgagccaacctcacttattcagcgatacgcgacagcagaagaagtcgccaacacaatcgtattcctcgcgtctgacgccgcatccgccattaacggcacggcacagcgtgtggaaggcggcattatccgttctctgtagtataaaaaacgcatccgttgtttcggatgcgttttttttatacgtctccagcaaatggtaccggctgatatccgcctgtttccagttgtgctgaaaacaaccctccagcgtgaggctgctcgtatctctctttttctgtcatttgttctgttgccgttgtaatgtaaagggtttttaagtctttgccgccgaacgcgcagcacgtgacatatttagccggcacgctgattgaattgatttcttttttctgaaacgggtcaatgtgaacaacgcggctgccgccaaacagcgccacccacagcatgccattttggtcaattgtcatgccgtccggcaatccgtccgactgatcaaaacgatagacaggttctggattcgaaacatccccgctttgaggatcatagctgtaacgtacaatctcctgggtcggcgtgtcgatgtaatacatcaaattccgctcgcggtcccaatccaaaccgtttgaggtggagacttgatccttgattttgacaagactgccgtctagattcaaacggtacagcgacgcctgtttttgctcgccttccatgctcgtcgtccccgcccaaagccttccgtacgggtcacatttagcatcattaaatctcaggctctcatgcatgtccttcggctgtttaattttttccaagctgtcatcccgaagatgatacaggtaaaacccgtccttcatcgtcataatcagttcatcctttgaatatttcgcaagcgccgtcacaaaggatttgaatttgattgatcggttgattttttcttcagggtcaaagatgtggagctcgctccccaggatatcaacccaatataagcggccgttttcttcatcccataacgggccttctccaatcactgcccgagtgtctgcttccaatactgcatccatgtgttacacctctttagcttcagtctatatattgttattcccggcaaagaggtgtccaaaccacttgatgtttattgttttttaaaaaggatggtaatgaccgttccaatgttcattctgctgttcacatggatcgttccgttatgcagatggacaagctccttggcaatcgcgagcccgagacccgttccggcagttgaatcttttgtgttcgtccctctgtagtaacggttaaacaaatgggtaatcgtttcttcatccattcctttcccattgtccttcacctttaaagatatatgattttttgtttgctccagaatgacttgaatctctgttcctttgtcgttgtgcttcacggcattcccaaggaggttttctaatatgcgcctgaaccacgcttcatcaagggcaaattcaatatgctcttctttggatacaaacgagatatcatagccttcagaaaacggatttttcttaaaatcctcaatgacatttttaaaaaacgggataaggctagtgagatttctctcaataggaagagcatcatttttcagccgatacgttaaatttaagtcttcaatcagcttagacatgtattcagatttttctctgacaacctgccccatttctttcacttcttccggcgaccagtcatactgcttcgactcgagcatcatgctgtagccgtaaatgctgctgagcggtgtttttaagtcatgtgacaaaccggcaatccattcttcccttgtcgcctggattttttctctgtttcttttatcccttctcagcgtttcagtcagctgatccattgattcaaatatctcaccgaagaagcggtacggctgtttgatttttccctttttatttttgctgacaggacggccttcccggtttctaggttcctcaagcttcccttttgacagattgaccagccatctaatcgtgtgaaaaatcggcagcccgaatcggaacatataccaaacggtcatccaaatgatatacatgaacaaaacggccatcacgagaaacatcgcttttaatacaaccttcaggaatgatttgttaaactcctgatcggttacatagactgggtttggcaccgtagcgaccatccatctgtctttattgaggatcttaacggaaatttcccgcttatagttccaaggcttagagctgtatttaagcagctccagctggttcatcgtttttctttcgctttttgtgctattgatgctgtcgagaatctttccattgctgtctaacaggtaaatggcgccttttttccgtttaatatagtcgatggtactagacttatagtgcgctagtgagtctatcttttgttcacgcttttcaacggaagtcaggagctgttcactttttgatttccagccggacaatagaagatacgacttatcttcaatattgatggcccaataattcagtttatagttatgaagctttttggttttataaatagacaaaagctctttcttggtataggtgcccggcacgtcttttggcacgccgtaggaataatcagtgtttccttccgaatcaatgatttgcatccagccgtgctgtttatcaacagatttcttcaggaaattatccacttcccatgtcccgtcttcgtttacatcgagatatgcctcaagtgtgtcggtcgttgctttcgtcagccctgaattggattccgcatcgctaaaacgggcgtctaaatagaaaaacgatgcaacaagcataaccgtaagcagcaggatcacaatcagcatctggccgaaaaagtgaaacaaaaacttccatcttaacctcatgaccgcttgccttcaggatttgggataaaacgatagccgagacctcgaacggttacaatatactccggattgctcggatcgcgctcaatcttctccctaagcttgcgaatatgaaccatgacggtgttgttgtcaccgtaggaaggatagccccatactttttcatatatttgatctttggaaagcaccacgttagggtgttcacaaaaatactgcaaaagctgcagaagctgggctgaacaggcaacggcttccccgcctacgatcaactcggcattttgcggagaaaaagtaaagtaatcatatgtgtaggtttgatttgaactcgtttctttcgattgatatgtacgcttgagatgcgctctgatccgcgccgctaattccagcggattaaatggttttgtgatatagtcatcagctccaaccgcaaagcccgataatttgtccgcgtcggatgatcttgccgtcaggaaaaaaatcggagcgtctgaatactctctgatcaatgtgcaggcttcaaaaccggacattccgcccatcatgacatccagcacaatcaagtcaaccttattggccttcacaacgggaatcgcttcttctgcgcttgccgcatccagtatatttcgataaccttctttttcgagaacgcgtttgatcatgtccacaatcgctttctcatcgtctacgattaaaattgacgcattttccacttttatgttcctttctgtcactgtttttttcatcttatcattatatcgtttatttatggtacatttttgaatacattggagcttggcaaatcaaaacagcaaaaaaggagcaaacaagcgctcccttttgatgttttttcatatgaaaatattatgagttctcatctaccatgtacaaaataaactcccaaaaccccggtacatcctgacataaaagcatatcagccttttcaaacattttgatcttcagctcttgctctaaatcttctctttcttgataggacgtattgctgagtttttttctgatcatcggtgaaaagcatgcaatcaggtgctcaatgtcataagtctcgtctttttgtttctttttttgttcaaactggccgtccacagcttacttttccccctttttttgcgccgctaactgctttctgatattctccagcccctttttatgaatgttggagatgttttgtcgggactcccctaatgaatctgcaatctcctgcatcgtggcaccgtgaagatagactttcgtcagcacacttttttgtttgtcagtcagcttctggatcgcttggtagagctggtaatcctgtacatgctggctcaaatcatcctgcctgtctaaaaattcttcaaatgcatcgctacctgtttcggaaggaagccgatctcccgcctccggatgatcaaccgtcagcggataccgtttttggtttttgcgaacccgcttatcaaaatcaatagaaaagatgcgaatcattgaattcatatacttgacgatgcggatttctttataaaattgcttaaatagctcgtccaatgatcttgcatctttttcgttagggctttccattacgtttttgaacaaacggtaatgctgaggattgctcaaaaaatgcttcacgatgggatgcttcattatctccttacattttgaccgtaaaagactttgatagtccatcaaaccgcctccctactaaattaaatgaaggaaagcaaaaaaaagtaaactactactttccgcctagtgtcttccaaaatactttgcagcagtttacgttttatcggttttcctcacttacatacatgactgcagaaaaagaagggaggtattttcctatggatcaggtttttatagaggaagtcgtaaaacagatcggcaatttggggtttcccgcgctgattgcaatgtatctgctgacccgattcgaaaagaagtttgatcaactaatagaactaatgacagaaatgaaagatcatgcaaaaaaataatttttcaatcgaagttgacttttcactggtttttttcacttaacaaaacagaagggaaaacgaaaggcctttcaccttctctttctgctatcacatttaaatgtaaggaggaaacatttcatgaaaaaacaaaatgacattccgcagccaattagaggagacaaaggagcaacggtaaaaatcccgcgcaatattgaaagagaccggcaaaaccctgatatgctcgttccgcctgaaaccgatcatggcaccgtcagcaatatgaagttttcgttctctgatactcataaccgattagaaaaaggcggatatgcccgtgaagtgacagtacgtgaattgccgatttcagaaaaccttgcatccgtaaatatgcggctgaagccaggcgccattcgcgagcttcactggcataaagaagcagaatgggcttatatgatttacggaagtgcaagagtcacaattgtagatgaaaaagggcgcagctttattgacgatgtaggtgaaggagacctttggtacttcccgtcaggcttgccgcactccatccaagcgctggatgagggagctgagttcctgctagtgtttgacgatggatcattctctgaaaacagcacgttccagctgacagattggctggcccacactccaaaagaagtcattgctgcgaacttcggcgtgacaaaagaagagatttccaatttgcctggcaaagaaaaatatatatttgaaaaccaacttcctggcagtttaaaagatgatattgtggaagggccgaatggcgaagtgccttatccatttacttaccgccttcttgaacaagagccgatcgaatctgagggaggaaaagtatacattgcagattcgacaaacttcaaagtgtctaaaaccatcgcatcagcgctcgtaacagtagaacccggcgccatgagagaactgcactggcacccgaatacccacgaatggcaatactacatctccggtaaagctagaatgaccgtttttgcatctgacggccatgccagaacgtttaattaccaagccggtgatgtcggatatgtaccatttgcaatgggtcattacgttgaaaacatcggggatgaaccgcttgtctttttagaaatcttcaaagacgaccattatgctgatgtatctttaaaccaatggcttgccatgcttcctgaaacatttgttcaagcgcaccttgacttgggcaaagactttactgatgtgctttcaaaagaaaagcacccagtagtgaaaaagaaatgcagtaaataaaagacttgcggcttgcagagagcactcgttctctgcaagccttcataaggagctgaaccagtgaaacatcaaaacccttcaaaacgcttattgcggctctccataaagtacttgctggccgcagcagcagtggtgttgacctattttgctgtcatctatatattgttttctttagcgggaacgagctaccgctcagcagctcatgtcctgctttttgccgtggtatttcttgttctcggattatgctttgaaccatttgaaaggctgatgatacatagctttacatttttcaagacaggaaaacgtctattcattctccttgccggcatcgtacagctgctatttttgtggatgactgctcatacaacagaccaattgatcagcgacatctggctgtccaccacagaagaaatgattgtcgcagccgtttttttgattttagacaaatgcaactcggctcttcccagctaaaaaaagaacgcattccaattggatgcgttctttttattcatagcgaagcgcgtctacaggctgaagcttcgaagccttgatagacggaagcaagccgaagataatgccgactgccattgaaaagatgagtgctccgacaacagctggaatggagacgataaaaggcatcggaaaaatgaccgtcagcagcttggcgatgccgaagcccgccagcacaccgagtattccgccaatgcttgtcagcacgacagcctcggttaaaaattgaaataaaatcacacgccgcttagcaccgagcgctttcttaattccgatttccctcgtgcgctccgttacggaaacgagcataatattcatgacgccgataccgcccaccaaaagtgaaatactggcgattccgccaagcagcaatgcaaatgactgattaaaggactccacttcctgcgcgatctcctgaagatccattacactgtactctgctttttccagctcagcttctgacagtccctgatttaaaagatctgcagccattacacccgcttcttggatatgctcagaagaatcagcctgcacggcaatctgtgttggcgcgtcaaacccttcaataagcggccacacttttttcggcacgtacaaaaccgggttcgcatagtcgccttcaaacatgctttcctgttgatttttttctttaaaaacaccgacgaccttaaacggcacaccattcatctcaatgtttttatgcagagcttctccgtctggaaacagttcatctctgacagcttcattgatcatcactacttggtgtgtgctgtttaaatcgttttccgtcagctttctcccttcggttattcggattggaaacatgtcgaagtaatcatcgtccactccatacacttggggatacgaaacgtttgttaaatgaaaaacgctcgcgccttctgacaagtaatataaggataatcctttgaccatcggatctgatttgatcgcctttactgtttcttccgctacaggcggcgcggacgcatacgacacctgagggccgccgctctcctcttctccgccagacggctggtagacaacgttgatcgcgttgtttcccatgccgatcatactttgctttaattgctcactttggcccttcagcattgaaacaatcgcgatgattgccgctatgccgataatcacgccgagcattgtcagaatcgatcttaatttatgagaaaaaatggattgaaaggagattcgaatatgttcaagcatggctgatatcccctctctcatctaataccagctctccgtctctgataaaaacggttctgtcagcttttttggcgacgtccgggtcgtgggttatcataataatggtcttgccttcccgatgcagttcagaaaacagtgacaaaatttgttcacttgatttggtatcaagcgccccggtcggttcatcagctaaaataaacctcggctgattgacaagggccctcgctatcgccacccgctgcttttggccgccggacagcttaggcggtttgtaggagaccctgtcttttaatccgaccttttccagcgcttcatatgcccgttgccttctctcttttttcttcactttattgtagatcatcggcagctcgacattttgcagcgcggtgagacgcggcagcaaatggaaagtttgaaacacaaacccgattgattcattgcgaatttcggctaaagccccgtctttccctttcaatatatcgatctggtcaagcgtataggttcctgaggttggcctgtccaaacagccgataatattcattagcgttgactttccagaaccggaaggccccataatagctaaaaactcccccgcctgaacagtcagattgatatgtttcaagattggaacttcttcttttcccagcttgtacgacttcgaaatattattcagtgtcagcattgactgtaacctgctttccttccttgaccgcgggatcaggatagatcacataatcttccggcgtcaggccgctcttaatttccaccatgtcattttcatcagtctctccgatttcaacaggctgcttaaccgctttgtgattctcatcagctttccatacgtacggttcgccgtcatcctgaatgaccatgtcggacggcagcttgatcgtgtccgcatcagcattatcactcatcacttcgatgttgacatgatagccgacttcaagacctttatggctgtctaataaaatggtgaaaggatagttagaggactggggattcatttcttcatcagcaaagctttctgattcttcaccctcgcctgctcccgctggaagcttgccgatcgaggtgacctttcctttccactcgccctcaccgcctgttttcagcgtgaccctgactttgctgccttttttgatcgtgtccattaacagctcattgatttggcttttgaccagatatttgcctgtcgaaacaatctggatatacgggcctgctgcctggtcgcctgttgcaccgtcagcgatatcctgattgacgctttgaacgattccgtcatgcttgcttgtaatgacattggaacctttgtttttcgtcaggccagccagttctttttgatgctgcttcagttcaagctggcttgttttcaaatcgaaattggcttggtcaagttcatcttgaagctgggttttctcttctttccctgcaactttcagcttcttttccgtttccgttattgatttttgcaaacggttgatttgcagatttgtcatttcaatttgcaaattggcttgctccacttcatcagaatgatcctcgccctcatactcaaaaagcttatcgccctttttaacctgatcgccttctttgacgtatgtttttttaatgctgcctttttctgaatctatgtatactttctgctgtttctcaggttcaacctttccagaaaacgtttggcctgattctgaatctcctcccatgtataccgcgaccgattcagcatagggctccgatgatacggcaacttggttcatgtgagtaaaaaagtaaaaaccgccagcgccgatcccagccaatacaagcacaccggcacatatcgcaccgccaataagccattttttcttcttggacacaacgatctcctctttctgtaaactatgtaatattttcgaaacattctaaccaatattatctattaattcaaaaagacttgcaatccttttattgaaatgacggaatcaaatagaaaaattgtattttccaagccgaataaaaaaaatcccggcttcaaaccgggattttttcatacagtaactagctctttttcatttttaatcaagtcatatgtcaagcatacaggtttatttgtacggggatcagtcacgatttcggcatcaatctgaaatacctgcttcaaaatgtctggtgtcatgacctccagagcagttccttccttgatgaccgtgccttttttgagcgcgatcatataatgagaaaaacgagctgcatggttaagatcatgaatgaccattaaaatcgtccgcccttgctctttgttgagtctgtcaagcagctgcagaatttcaagctgatgtgcaagatcaagatacgttgtaggttcatccagcagaagcagttccgtcccttgcgcaagcgccatggcaatccacacgcgttgacgctgtccgcctgacaatgcctcaatcggccgttcagcatattcagccatgcctgtttcttcaagcgcccatttgataatccgtcggtcttcgtcatttaatctgccgaatcctgattgatgcggaaacctgccgtacgacaccaattcgtgcactgttaggccgctcggcgcttcaggtgtctgtggaagaatcgccatatcttttgcaatgtcctttgtagacattttatgaatcgctttgccgtttaaatagacggcacctgcatgtgaacgcataattctggacattgtttttaaaatcgttgatttcccgcagccgttcgggccaattaaggtggtaattttccctttaggaatcgatatatttaaatcctctacaatcgccctgtcgccataaccgattccaagctgttccgttgataatgaattcatattcggccccctcctctaattcgctttcatcaataaataaataaagtaaggcgcacctagcacggaaatgacaagtccgaccggaatttctgatggtgccaatacatttctcgccagcgtatcagcaagcaaaaacaggaatgagccgatgaaggcggagaccggtatcagcgtctggtgacgtggaccggtcagccttctagccacatgcggcgcgatcaatccgagaaacgcaatgccccccgcagctgccacgcatgaagcggcaagagtaaccgctgccagaagaagaatccgtctttccttttcaacagcggtgcccagcccggtcgccaattggtctccgagctgcataatgttcaaatagcgtgccttatataaagtaaacagaagcaagatcacaatccaagggagaatcgcccagatcatattccagttcgccccccatattgagccggatatccaaaccgcggcttgcataaaatcatgagggtccatcttaagctgaaaaatcagcaacagggcattgaatccggcattcacccctatgccgactaaaatcagccgaatcggtgtcacgccttttttccatgccagaatataaatgagaaacgcagcgaggattgctcctgccaaagcactgaatggcagcataaatgttccgaaaaagctgagatctgaagctgacccttgaaaaaagtatataaaaagcactacagcaagtgaaccgccggcgttaattccgagaataccaggctcggcaagttcattttgagacacgctttgcaaaatggctccagctacggagatccctgctccaacaagcaaagaaaggatgatccgaggcagcctgaactcaaataagacaagttcatcacgcgccgttccttggccgaaaaagacctgaagcgttttaagcggtgcaattttgataacgcccaaattgagactgataaaaaagaccaccacgataagcaaaaaggtcacagccattacaataagcggtttgtttgtttttgttttcattacagccctctcctttcacgacgtgccaaataaaagaaaaagggaacgccgatcagagaagttagcgcaccgacaggcgtttcaaagggcgcatttacgagtctggccgctatgtcagcaaaaacaagcaaaacagcaccgagcaccgccgagcaaggaatgatccaccgataatccacaccgaccaaaaaacgggtaatatgcggaatgatcagcccgataaatgcaatggtgccggcaatggaaaccgcagctccggtcagaattactacaataagcatgcccaccagtttcactgctgatgtatattgtccaagccctttcgccagatcgtcaccgagacttaacactgtcacagatcgggcgataaaaaacgcgagcgttaaaccgacagcccctgcaataagcaaaagctggacccccgaccatttcacacccgctaccccgccagcgtaccaaaagctgatatcctgagcgacatcaaagcggattgcaatggcagttgaaatgccggtaaagaaataagtaactgccgtacccgccagagcaagctttacaggcgtaagtccgccccttgaaaacaagccgatgcccattaccgtcgatgcccccagccccgctcccgcaaaggaccatagcacaagccccattgcagaaagtccgggaaaaaaggcaaacgcaatcgaaaccgcaaacgcagagcctgatgtcacacccataatcgaaggctctgccaaagggtttctcgtcatcccctgcatgattgctcccgacactgccaacaatgcgcctacaagcgcggcagccgccgttctcggaagccgaagatcatgtataatttggtgagatgtctttgtcggctgataatgaaaaatggcgtcccatacagtgcgcaaatgaatatccgctgcaccgagggatatggataaaaatgcgccaaggcaaagcaggcatagacctgcaataaggacgatgaccgcgccatatgtccttgacgtccattggatttcttctgatgcagtccgtatatttttatgttgactcaactgccgtacttcctttctgttactgataatgattatcaattgctgtttcagtatatcacttttttcagctgatttaatagagtgttttgaacaaaaatgaaaatgcatttgcaaaaatatcgtgtcaaccggcacttgcagtggtataatcacagatgataatgattctctttttcatctattttttagaaagaaggtatgagatatgacccatatatacaagaaactcggagccgcgttttttgccctgttattgattgcagcgctggcagcctgcgggaataactcagaaagcaaaggttctgcctctgattcaaaaggcgcagaaacctttacatacaaggctgaaaacggaaatgtaaaaatcccgaagcatcctaaacgggtggttgtcatggcagacggctattacggctacttcaaaacactcggcatcaacgttgtcggtgcgcctgagaatgtatttaaaaacccttactacaaaggaaaaaccgacggcgttgaaaacatcggagacggcacttcggttgaaaaggtcattgatttgaaccctgacctgattatcgtctggacaacacagggcgctgatattaaaaagcttgaaaaaattgcgccgactgtcgcagtaaaatacgataagctcgacaacatcgaacagctgaaagaatttgcaaaaatgacgggaactgaagataaagctgaaaaatggctggccaagtgggataaaaaagttgcggccgctaaaacaaaaatcaaaaaagcggtcggtgacaaaaccatttccattatgcaaacgaacggaaaagacatttacgtattcggtaaagactttggaagaggcggaagcatcatttacaaagaccttggcctgcaggctacaaagctgacaaaagaaaaagccattgaccaggggccaggttatacaagtatttcattagagaagctccctgactttgccggggattacattttcgcgggcccatggcaatcaggcggtgatgatggcggcgtttttgaaagctccatttggaagaacctgaatgccgttaaaaatggccatgtctacaagatggatccgatcggtttctatttctctgacccgatttcattagaaggacaactgaagtttattacggaaagcttgactaaataaacaaaagagccgcctgcccgcggctcttttgcaaatttataaggaacagctcaatttgaatcatatcagatattttctttgagccattcatattaagctgcatcctcatcgcgatcagtttttttatgctggagagactgaaaaacgttttttgcatattcgattgtgccttaaagtttttctttcgatttcagctttcctgtcagctaggttaacgaacggattcttaacagaagaaattgtgattttataaaaaagacacctgagcaaatcaggtgtcttttcattatgcttgtttttctttctggaactttttactcacaaatgtataaacgattaagccgacaaagaataaaccgatgccgaggataaatgtcgttaaatctgctgtgcctgttacgataacaaacacggagtatgcacacgccagtatcgcgatcaatccgtctcttacacgggagcctttcagctggtcatacgtttcacctttgatgactaccttcaagctgtagattgcagataccagatacggaattaaatatgcgagtgtagccgctgtcgttaaaaatgtaaatgcgtcacttattgtccgggaaataaccgagaaaatgaagacctgtgacatgacgtttgtaataatgagtgcaatgaccggacttccctttttattcgtttttgcaaaaaatgccgggaaatctcctgctttagcggcttggtatggcacctcagagccaagcaaaatccagccgagcatcgttccgaataaacaaaggatagccaaaagcgccataatcacgcttcccgcgtttccaacaatcgcatagagtacatcaacaaatggtttttcagagccgacaagcttatcatgcggcagaacacccatcgtaattaaagtcacaataatatatatgctcaaggcaatcagcaagccggtaattgtcgcacgtttcacatcacgctgagagcgcgcacggccggacaggatcaccgcggattcaattccgacaaacgcccacagtgtagaaatcgcggcgttatgaacctggccgccaattccaatgcttgtgccgttttctccttgaaccgggaaataaaaatgaccgaataatgtcgtttgaaacacaaacaaaccggcaacgataaagaagacaaaacctaatactttagaaagcgttgtgacaaagtttaatttacttgcgccgttaatgctggcaacaagaatcgcgtgcgttccccataacaagatcgtacatacggcaaacgtcagtaattggccgagtgtcacctcttgcccgccgatcgaaaacatctcacgtttatcaaccaagatcgggaagaacgaagtcaagtaaccggcgagacttgtgatgatcgccacgttgctgatccagctcgccacccagtagccccacaccattgtgaaaccggcagcgttgccttttttcgggtcagaaaacagcgctcttgcataactttgcggtcccgctgtcagttcaggcttgcgaatggacaagtgtccgaacacaagtgcaatcatcagcacgccggcacctgtcaaaagccaggcggacgtagctccaaacggactcgcaattgaagcaagcgagctcggcaaggagaaaattcctgatccaaccatatttccaacgacaaacgccgttaataaccaaaaaccccatttttttgtctgttccattccagtacctccatgattctttgtacggaccagaccccgagatcatataaacgcaaaaaaagcctgaacaaaagtccatgcttaaagaaacacacacccttgatctccggatagccctccgcgaaaaagcacgcggcagtcctgcacttattcagatacagtcccagcatagagaaggatcggctttctccacacttcggcgctgatgccttttacacatgtttaacagcccctgtcagcctggcatgtgtgacttatcatccgcgcaacctctacctcactgagaaagagtgaggatttaattattcagttactcccagaaggttatcaaagaaaggatgatctgtcaaagggaacagatggaaaatacggatagagccaagccctatccgcatgtgattatcgattatttttctttttttgcacagcttcttgaagcggatcatcttttagagctgaaccagcatcttcaagagctccttggattacgtttttttctttttcggaacgttttcctttatctttattaaagaaacccattcgtatcacctcttttaaaaaataggtacatgtttaagatgcctcttttatgaaaaattatgcgggatattttttatcgtccaaagtcctgttgatcaaacatacattctcttgatatatttgtaattcagagattttttgcaaaagataaaaggagaagcggcaaatgacaggaaaaacacacatcatgggaggcatcgcttcttgtacggcagcggcttattattatggatttgatccagtgcttatggctgcgtcaggcgcggttggagcattaatacccgatatctgccacacacaaagcaaaatcgggagaaaatttcctattttatcgaaagtggtcagctccgtttttggccatcgtacatttacacacagcttgctgtttatgctcatcatgttttttatcacttctacatacattccagataaaaacatatcagccggcctgatgatcggaatggcaagccacttgattcttgacgcttggacggtaaacggaatcaaattattattcccttcaacgatccgcgttcggcttccattatatatgaagacaggcagtttttctgagcagctcgtgctagctggcctgacccttgcttcatgttactacttttatatgctgtttcatgggcgcatgttttaaacatgagtgctgagacttgtctgaaccggctgtttttagtaggttttacttaagaagcatttcatgcagatgatcaagaaaacgcgaggagtcatattgatgaaaggaaccttttttcacaatcagcggtttttatgtttttcgatcttatttatgtggatcaaaacgtatgtgatatataaactcggctttgatttgcaaatcgatactctgttggaggagctaatgctgctggtcaacccgctcagctttattcttcctttattcgggatcggcctgtttctaaaagaaaacaagcagcgggcctttttgctgatcgccaatttggttctgactgttatcttgatctctaatacgattttttacggcttttatatcgattttattaccatcccggttttatttcaggccagcaacatgagcgatatgggcagcagtgtaaaagaactgttccatcctctgtttatcgccctgtttgtggatttggtttttctgctgctgttcgccagaaaaaccaaacacccacagacaaaagccgctccccgcacgatcaaacggtactatgcagcttcctgcggcatgcttttatgcacactggcacttgcagaagtacagcagccgaagcttttggcacattcttttgaccgggaaatgctagtcaaaagcatcggtctgtttcagttccatatttacgatacaatttctcagactgttaatatcagcgcgaaagcttttgccgatgaagacagtataactgccattaaaaactacacagaggctgattacagcaagcctgatcaaagcaaattcggtcttgcaaaggggcgcaatgtcatctttgtaacacttgaatcgacccaaagctttgttctgaatgaaaaagtaaatggaaaagaaattaccccatttatgaatgatctcataaaaaaaagctattcctttgatcatttctatcagcaaacagaacaaggaaaaacatcagattcagaatttatcgtcgctaactcactgtatccttcccttagcggcgccgtctttttcacgaaaagcgaccatcaatttcatacgatgtataaatcgctgaaacagcacgattattattcagccgtctttcatgctaaccataaaacattttggaacagagatgtcatgtacgatacgtttggcattgaccgcttttttgatgttgatgattttcatgtcactcccgggacatcgacaagctggggcttaaaagacaaagaatttttagagcagtccgccgaaaagctgaaaagcctgccacagccgttctacagcagttttatcacgttaacgaatcattttccgtttgagattgatgaaaaggatcagctgatagatgaattcgattcaagcagtgatctgttaaaccgctatgtgaccacggttcgctatgaggatgaagcattgaggcattttatcaaaaaactgaaagacgaaggcttatacgaaaattcgatgatcgtatttatgggagatcattacggcatttctgaagcccataacgaggcaatggctgagtttttagggaaagacgaaatcacaccgtatgacaacgttcagctccagcgggtgccgtttatcatacatatcccgggaatcaccgatcaaaagccggaaaccatccctgatgccgggggacaggtcgacgtcaggccgacgctgatgcatttgctcggcgttgagacaaaaggcgatatccaattcggcaatgatttgctgtcgggcgaccgcaccccattcgccgttctgcgaaacggcagctttattacgaacgattatatatacacaaagaacacgtgctatagccaaaaaacaggtgaagtgctggaagatcaggatgcgtgcctcccttataaggagaaagcaaacgaagaactgtctttctctgataaaattttaaatggtgacctgctcaggttttccgaatgaaaaaaatccctctatcaagagggattttttacgtttccaatatcaccttgccagtcagcttcgtttcatagccgtttaattgagacaaattcgccttgtattcctcagaattcaaaatctccttcacggccttaagcagctgctcatgttttttcaaaacgacaatatcatattgttcgtcgatgagcgggataaaatcaacactgcccatatgtgccgcgtgctgtgccccgattcccgcgtcagcctgtccgcttgaaacttgtgaagcggcagcgtaatgatcggtcacgatatcgtcgtatccctttacatcagccggattcacaccaagcaagccaagctgttcatcaaggagcacccttgcgccagaacccttttccctgttgatgatccggatatcggctcttttcaagtctttccagccttgaatgtttttcggattccctttttgcacatacagtcctgctttccggagaacgacattgatgagacaaaacggttcacctgtcaagatccgtttcacataaggagcgttatactggcccgtttcagcatcgtacaaatggaggctgacaatgtcacacttgccttgatacatatcaatcaggctgtttaagcttcctttgtatttacggagcggcgtctcttgaatggcattctccaaatgcttgctgagaagatccatcgaaatgtcctgtccgctgatcatgacattcggtctgccgtccggctcagcctcctgcacctgtttcggtgcttctgttgcagcgatgggctgagacattctcatattcgttttatattgctttaaatcttcttcatccacacgcatctgccttccgacacgataagcaggcagcacgccttttttaatcaagtcataaacggtcagctttgataccttcagcagacctgcaacttcttctatcgtataggaagaggtttcattcatcatcatcactctcctattttattataccttttcgttgaatgtaaaaaaacccacataaaccaaacataatcagttataattagttatatctaatgataaggggtgcaatcatgtttaagaagtattctattttcatcgcagccttaaccgcttttctgcttgcagcaggctgttcttcaaaccagtcttcaacggacagcgagaaaaaagtaacgttaactatctcagctgccgccagcgcgcaggatgcacttgaggaaatccaaaaaaattatgaaaaagagcatcaaagtattaccatccaagataactatggctcatccggcgccttgcaaaaacagatttctcaaggagcaggagcagatctgttcttctcagctgctgaggataaatttaaaaagctggtggatgatggagatatcgcaaaaaaagacagcactgatttagtcggtaatgaaattgtgctggtcgtaccgaaaaacggagattcacctgtgacaagcttcagcaatctggctgaatcagaaaaaatcgctctcggcacgccggaatccgtaccggcaggagcttatgggaaagaatcactgacaaagctgtctctatgggacaaagtgaaggataaaattgtgtatggaaaagacgttcgccaagttctttcttatgttgaaactggcaatgtagacgcaggtattgtttataaaacagatgccctggtctcgaaaaaggtcaacattatcgacgaggcaaaagcagatacacacagcccaattatctatccgttaggaatcgtaaaagatacaaaacaccgtaaggaagcgaaggaattttacgaatacctgcaatctgatgaagcaatgaaagtatttgagaaatatggctttactgccaagtagcataagcgcttcagaatttttcacacccgttgtgctttcctttcaggtggcggcagttgccggaattgttgtcattattctcggaacacttgctggagcatggatgtcacgggcatcatttttcggaaaaacggcactcgaaacatgttttatgcttccgctcgttcttccgcctactgttgtcggttttattttgatcgtcattttcggaaagcacagcttcatcggacaagccatcgagtggattttccagcagcctgtcattttcacctggtgggccgctgtgatcgcctcggctgttgtagcctttccgcttatgtatcaatcagccaaaaccggatttgctgacattgatcccgatatacaaggtgcggcaatggtagacggcgctagcagatggaaagtgtttatccatatctccgtcccgcttgcctatccttcgttactgaccggaagcatcctcagccttgcgcgggcgctcggagaatttggcgcaacactcatgtttgcaggaaacatccccggtgttacgcaaacactgccgacggcgatatatgtcgcattggattccggcaacaatacccttgcttgggcgtgggtcgtctgtattgttgtcatttcctttttgatgctgtttttcattcaacagaaaaaaacgcactaaaaaaactccccataacagggagttttttgattaaaacagaagctcatcaggatttgggccgacacgctcatctttatttaatgcgtcaattttgtccatgtcttcttgagacaattcgaaatcaaaaatatcagcgttttcgatgatacggtgttctttaatggattttggaatggttacaacttcatgctgcagatcccagcgcaaaatcacttgagccacagatttattgtgtttttcagcaatctgtgtcagtacttcgttatccaaaagctgtccctgcatgagcggagaccacgcttccagctgaatgccttgcgctttgcagtaatctcttaattctttttgcgtcaagcgagggtgaaactcaacttggttcaccatcggtttgatttcagcatctttcaacagctcttctaaatgatgaacttggaagttgctgacgccgatcgcgcggattttgccgtctttgtacagcttttcaagcgcgcgccatgtatctttatatttatctttgccaggccagtggatcaaatataaatctaagtaatcaagctgcaatctttccagactcttttcaaaggcagcaagcgttgtttcgtagccttgatcttcattccacacttttgatgtgatgaagagctcttctcttgccacaccggattctttaatcccgatgccaacgccttcttcatttttgtagatcgctgctgtatcaatgctgcgatagccatttttaattgccgctttcactgattcagtcgcttcattaccattttctactttaaaaacacccagaccgaaccaaggcatttcaactccgttatgtaactttacagtatcttttaaacttgttggcacttgaacatccaccctttcactgaaatgtaagcgtctatattatctcacattcctctcagccgataccaataatacgcttaagaccctctttttgcttcttttttcacagcacaggcaaatccaaacactatttttttcctattttaacaatattgagattacaaatacattgagcagggtatgcgtgtagtgtaaccaaatgaaaacaaaggaggaaacaacttgaaacgtattcgtatcccaatgacacttgctcttggtgccgctttgacaattgcccctttgtcctttgcttccgctgaagaaaatcctgctccgaagatgtcgcagacaactgctgctggaacaactgccgctgatgtaggtttaaacgtcaatctggatgtacttggaattgccaaccagatcgctgatgccatcaaatccgcacagaacagggatgggtttgtgaaaaacctcatggagtcttccttctacgcatccggccaaaaatataatgtcatggtctttaatttaagccaggaatatgaagatcatttgaacggtgtgcaattttacggctcagccgtttacgacggcattacgtatggcatttgggtatttgaagatggaacctttacaaacaaaggcgatggcggctggatcaactgggccttcagaggctggttcgaccgggatggcagcactgtcgcatttcatcgcccttaatatagaaaaaagctggcgctctaacgccagcttttttgctgcatttattcgccgccttcaagcatggcggcttcgacatcattaatgtattggcgaagctcatgggagatgtcccgggaaatttctctttcctcgaaaagtgtttgaatttcatttctgatcgcctgtacagccttcagcttcacttccagcttctgattttcaaaatgggcgcttgatttcagctcatgatggctgtgctccagcctgaaaattaactgtttatagaatgtaatgacagataaaaacacttctttatgctcttccgtcttgtgtttttccagatattctatcgctgcttttgccgttttcactcttgttgcccgtatcaatcccgcttcatttaaaatcgacatctccggctttttatgttcaccgaagaaaatccaatacatcagcctcttgagccttgtttttgataatccgactttaaacgggttcgcatacaaaatttccaactcgttaaatcgttcttgcagcacatttgctgtttcttccgggatgtctccccgctccagcattttcatcagcgcctcttgctctgccttaaccccttgggcacggactttacgctcgtgctttttgatgcgattagacgatgtatattgctgaaaacgaagatttttcattttctcattgtattcagctatcaccgcaagcgaggccgttttgtttgtctcattcatgtcctctttaatcgtttgaagggctgttttgatcaatttgcgtctcgccgtcagcagcttcttgtttcgttcctcgtcctcttcttctttttcagtcagaatcggcagcacaacggtagcaatgacaagcgtgcataaaatgacgccggctgctaaaaagagaatcagatttctttccggaaacggcgtgccgtcctccaggaaatacggaatggaaaaagaacctgcaagcgttactgctccacgcacaccggaaatcgaaattaacagcgtcgaacgaagacccggtttatagatgttctgatctttattaaagaaccatttgccgttccagaagaacagcacccacaggaatctcaggagcattaacgtaaatgtgatgactaggatatagccgatcaccttcatgttgctgatggcagtgtcgttaaagataacagaaataacatcagggatttgcgtgccgagaataacgaagaccagaccgttcaaaataaataaaataatgttccacgtacttgaggagacaatttgcagcttgatcatcgttgattccagacgatcctgttcaaccgcatgggtaataccgccagccacaacagctaaaatgccggaaacgccgatttcttcagctgccaaataaatcacaaacggcgtcagaatttgaatcagcatatgcatcgtgacatcctgcatgccaaggcggcgcagaaataggcgaaaacgaataatcaaaaatgaaatgacaaccccgcacagcaagcctccgagagaaataaagacaaagctgacagccgcttgtgctaatgaaaatgcgccagtcactgccgctgcaatcgcaaacttaaaggccaccagacctgatgcgtcattcatcagcccctcaccttccagcaggcgaagaatcccttttggcattttcactcttcctgataatgcgctgacagcgacgacatcagtcggtgaaagaatggccgcaagtccaaaggccgctgccagcggaatagcaggaatcatccagtgaatcgtgtagccgcctacaatcacagtcgcaaatacaaggccgagtgcaagcaataaaatcggagcccttaaattccaaagctctgcccgcggtgtcctctttccatcattaaatagcagaggcgcgataaaaagaacaaaaaacaattcggtgtttaattcaaaatgaagtccctgtggaaatgaggcggcaagaatcccaagagccacttgaatcagcggcaccggaataaacggaataaaccggttcacgatattagaaatcgcaataatcgttaataatacgagcacaactaaaaatatgtccaaatgcatgacctccttcgtctgttgtgtgtcggcatgatgagccaaaaaatctgtttgtctaaaagcccttgagctagggtggccttgcatccgctatgtggttccgcaggagttctctccacacttgtcttcttttatagtaccctttttagggtattttttctcatgatatgctcacagtgaacttttttgcagcagagcaaattacagaaaaaagagacaggaagctactccctgtctctcgtctttctttctcaatcatgaaaattcgtaccgtcagttgttgctttgataatgcccgcgcggatgacaaagtcaccgaaatgctcgccttcctcacgttctttcgcatagcgggaaagaaggatgcgcagctcgcttaaaatgtctgcttcaccgatgttttcacggtacattttgcttaaacggcttccgtcaaacgcagcgccaagatacatattatatttgcccggcgcctttccgataaatccgatctcaccgagtgcatgacgtgcacagccgttcggacaccctgtcatgcgaatggtgatttcctgatcacgaaggccgttttcgtcaataatctcttcaatcttatctaacagggtcggcaaataacgttctgcttcggccattgccaatccgcaggtcggaagagcgacgcatgccatcgagctgcggcgaagtgctgaatagtgcttgccgtcagttagtccgtactgttcaattaaagcactgatttcttcttttttatcgcttgaaacgttcgcaatcattaagttctgattggctgtcagccggaactcacctgtatgaactttggcgatttcccgcaagccagtcatcagcttataatcatcgtaatccgttatacggccgccttcgacaaacagcgtgaaatgccatttatcctcgatgccttccacccagccatagcggtcgccgttatgatcgaaatgatacggcttcgcttcttccaggctccagccgagacggttttccaattcttcttttacgttttctaaaccgaggcggtcaactgtgtatttgaaccgcgcatttttacggacagaacggttgccgtaatcacgctgaatcgtaatcgttttttcagcaacgtcatacatttgctcaggccggcagaatccgatcaccttggctaattgcggatatgtcgcagtatcgccatgcgtcattcccataccgccgccgattgccacgttaaaaccgatcagcttgccatcctcgacaatcgcaatgaatccgagatcttgtgaaaagacgtcaatatcattagacggcggaacggcaataccgattttaaacttccgcggcagatagagcggtccgtacattggctcgacttcttcctccggcgtgccggcaactctttcctcatcaagccaaatttcatgatatgctctcgtccgcggcagcagatcatcacttaattttttagaccactcgtatacctctgagtggatttcagattgataagggtttgatgcacacatgacgttacggtttacgtctccgcaggctgcgatcgtatccaaaagtgctgagtggatcgtctgaatggttttcttcatgttccatttcagaatcccgtgcatttggaacgtttcacgtgtcgtcaattttaatgtgccgttcccgtatttctgggacaggtcatccatgacaagccattgttcaggcgtcgagacgcccccgggcatacgcacgcgcagcatgaactgatatgcgggctcaagcttctgcttttggcgttcatttcggaggtcgcggtcatcctgcaaataactgccgtggtgtttcatcaggcggttatcatcatccggaattcccgcactgattcgatcgagcatcacttctttcagcgtgccgcgcaaataatcactttcttttttaatgcgttcaacatcacttggagagccgtccggtgcttttagaattttggtcaccatgttgaaaaactcctttcaagtcaaatcaatatacatcacgctgatagcgtttttgctgctgcatatcggcaagataagcctccgcttcttcgcggctcatattgccttctttttcgataatttcaagcaatgtgttatggacgtcatgcgccatgtgcttttcatctccgcaaatgtaaacagccgctccttcttgaagccattcaaacaattctgcgctatgttcaagcatgcggtgctgcacatatactttttcttccgtatcacgtgagaacgccacatccatttttgtcagcacaccgtctttgagccaattctgccactctgtctggtaaaggaaatccgtgacaaagtgctgatcgccaaagaacatccatgcctttccttccgctcccgtctcctcacgctcctgcataaaggaacggaaaggtgcgacgcctgtcccagggcccaccatgataatcggtgtttcagggtctttcggaagcttaaagttttgattgtgctgtacataaaccggcagtgtgtctcccggctgcagacgttccgcgcacaaaatcgagcagacgccttttcgttcacggccgtgcgcatcgtagcggactgcgccgattgttaaatgcacttcatccggatttgcggataaactgcttgcaatcgaataaaggcgggcaggcatttttcgcaaaatcgagacaaactcctgcgcagatacactaaatgggccatagtcacggacgagatcaagcaaatcgcgcccttcaatataggcttttacattctcctcatttcccggggctaaaagctctctaagctcatcgttccctgtcagctgggctgcctgttcaagaagcggttttgtgagaacggtaatctcatagtgagaaatcagcgcttctttcagcggacggacatcaccttgcttattaagcgtcacaatttcttccgggtcccaattcatttccttaaggagcagctcgacaagttccggatcgttttctggatagacgccgaggctgtcaccaggctcgtaagtcaggcctgatccttcaagagacagctccacatggcgtgtttctttatttgatcctctgccgtttaaatttaaattttctaacacttcagcccgaaacgggtttgttctggaatacgaagactcaccggtttgtgacgcagccgccggcgcaggcgcggcggttccgcccccagcttcatttaatcccttcaatacaccctcaagccattcggctgccggttcatcatagtcaagatcgcaatcaacgcgcggagaaatccgttttccgccgagttcttctaagcgctgatcaaattctttccctgtctggcagaaaaattcgtacgaactgtcaccaagcgccaaaacggaaaagcgcaggtcttcaagcttaggcgcccgtcttccgtgcagaaattcatgaaacgacagcgcgttatcaggcggctcgccttctccatgcgtactgacgacgattaaaagattggttaccttcttcagctgattcggcttaaaatcgctcatggatgagacggtcacttgaaaaccgctctgttcaagctgcttgccggcattttccgcaagcccctgtgcgtttcccgtctgtgaaccataaagaacggtcacttcttttgaaacggccggtgcttccgcagacacagctgccgccggcgcacccgcagtttcttgggcggaaacagattgcgcggataagtatccgctcagccagattttctgggattcggtcaaggtcggcagaaggcggttaaggagctctgcctgctcctgattaaacggactgttcattacctgaagttgcaacgtatccacctcacaaagttataaactgatcgaaaattgcatctaattgaactttaccggaatactaggcttaagtaaaatatatttacatgatgataactattaagaatcctaatgataaaacggctatgcttcatgtaaatagaaaaaagagaaggactcccttctcttcattcagccatctgatataagtgaggcggcacagcggttacaaacggactggcttcacctgtataaaatactgccagcatgtgcatcgcacgggtgcacgcagtatataaaagcctgcggtcgtgctctgtatgatagtgttcttcagatgcatcatagacaagcactgcgtcaaattcaattcccttcgctaaatacaccggaatcacgcaaacacccttttgaaatggttgattttctttatgaatcaggcgaacatctgtatattcactcatgtgggcgtgcgcctgtatgcattgctgcgcagtcttgcagatgacggctattgtttcgcgcccttttttcttgagccggccaatttcttgcgcgagcttttggcaaaggctctcatgtccttcagttttgacaacgagcggcatttccccgcttctattaaacggctcaatatccgctccatattgaagcatcgctttggtaaactcgacaatctgccttgttgatctgtatgttctctttaaacgaacatactcagcaggctcatcctcaaagcacgcatccatacgctgatccccgtgtatggtatgcgcgtagatggactgattgatatcaccgagcactgtcatgctggcagccggaaaaatgcttctcatgtaaaccatctgaaacggtgaatagtcctgagcttcgtcaataaatagatgtttgatcttcgtatttttctttctgccctcaatcagatcctgcatataaagaaacggtgctgcgtcctcatagagcaatttattatccgtaaatgccgaactggtcagctcacctatcgcgtccatcttctcatgctgaaattttcctccccagccagaaaacaattgcaaataaagttgtgtaacatcaagaaatgcaaggagtctgaccgcctgtttgagcggtttgaaagcttttttcacaatgatggcggcaagcagctgctgctctctttgataatcgttaaacgtactctcgctgaaccgtttcctttcttgcagttttctgtacacgtccaagtagtcctctttgtcaagcagctcagcttcatgaacaacccaatcctttcgccgttcctttttctcaagcttgttaagctcactcagcagccacttcgcggtttgctccatccgattcggaatggagtgattttgatccaatgagtaaaaataggattgaatttgctcctttgtgatcagcttttgtccgcggaatataatatttttaaaaatcatcccttcagaggaaagccgtgtgacgtattcattaatgaattgctgaaaggataaacccgccttccatgtgattcccgcaagccttgttggaaaatcgccttccttagtttcggtcaggcaatattcgagctgatcaaaggcgctttcacatttgaacttgcggccaagacgatgctcgatatattcctgaaacgtcgcctgctccatattctcttctcctaactcaggcaaaacagaggatacatagctgttaaataagaagttgggagaaaacaaaacgatttgtccggcatcaatgacgccgcggtgcctgtataacaaataagcgacacgctgaagcgcagccgatgttttcccgctgccagccgctccctgcacgatcaggatcttgcttttttcattacggataatctgattttgttctttctgaatcgtagacacgatgtttttcatttgggtatcggagtgatggcttaatacctcttgcagcatttcatcgccaatcgtcatatcggtattaaacatcgccttgagagtgccgtttttgatcataaactggcgtttcagcaccatttccccttctatcgtttcaccgggcacctcgtactccgcttttcctggagaataattgtagtacaaacttgatatcggcgccctccagtcatagatcagaaagtgttcctctttctcatccaaacaggaagctaaaccgatataaattcgctctgcctccgcctcgccgttttcaataaaatcaatccggccgaaataaggcgattttttcaattgatgaattcgtttgagctgctgatccatgcgccgatgattctgttcccgatcagacagcagctctgcctgctgcttaatgcttgccatcgtttcaatcgcttcatgggcatcatcaaaattaaccttaacatcctcccaaaagctttttcttaatccgatgatatcatgcttcaacccgcccgcagacgtttccagaaaccgctcttttttttcgagctccttcagcacctcatctattctcgactgctcttccttccattccttatcctgctgattcatgaacggcacctccagaaaatagttgacaaacatagatgaaatactgtaaaatataattggatacatatattaaatatatgatgtaaactggcaaatacaatttataatagcacattcacccaataccaatcaaggtttgggttatttatatgcagaaaaaaccgatttcaactcgaaatcggttttttctcttatgatttcacattgatcactgttggacgtgcttttcttaggttgcgaatcttctctttcatcagtatcgattccttattcctttcaatcttcgatataatatatctttttcattttaaaaacaccgcagagctttaccgtatttgtctgttcatctaacgtgaagaatgactaaactggctgttattgtcatcttccataaagcaactacatctctgctatcgtatctatagtcgcagtaaaatagtcatttttcacccattttcgacacatttcaacaaattaaagtttttcatttgggagaataggacgatgttacattatttctctcggtttatgatatgaacatgaagaaagaaccagaattagttaggaggaaatactcagtgaagaaaaagctatctatgttgttgctggcattcgtcgtagccgtaacaagttttacgtcaattgacctagtaaacaacaaagcggaagctaaagattgggttaaaaaaggtcaaatatggagtactcattaccattcgggctcatttaaaaactatacttactcgccaacttttcatatttattatccaggacgaggaacttgggccaacatgacatcaaatggatcaggcagcgggaaaattacagcaactctgcaacaaaagacaaataaaggctggaaaaatgttaaaactttttacgcaacgaaaaaaggctctacaaatttaagttacaaacaagcttctaaaagctacaaaacaaaatacagattcaaattcactaacacaggaactaaaaaaaccatcagctataccttttgggctacctattaatttcaaatagctttgctctgcgcggtcagcattcgaaaaggactttttatttgatcccggcaggctaccataaaagaaacctctccgtcatggagaggtttcttttattttactgactatctaagcgaaaagaacggtttggcagcttccaattaaacatataggaacaaacccggcaaacaacgagcacgaaaaacagaacgtataagccgaacgagttccccatccagcccaagccgacgattaaaccgccgagagccgcccagactgcataaatttctgccttcagcacaagcggtttgcgaccggcaagaaggtcgcggatgattccgcccccgcttcccgtcagcaccgcagccacgatcacggcactaagcggatggcccattttgacagcatacagtgcgccttggatagcaaaggcagcgaggccgatcgcatctgataaattgccccacttattccaatgcttcagcagcagcttcggaaacagaaacacaattgtaatagataaaagcgcgatttgaaagtacgctccctgctcccatagcgctgacaccggaacaccgatcagcaaattgcggatcgctcctcctccaaaagctgtgacaatccctaatatataaactcctaaaatatcatattcctcttccatcgcaacaattgcgccgctgactgcaaacgcaatgatgccaatcacactaagcagctcccaagccattctgatgactcccttttatgtttgttaaattttctgacgacctctagattttataatcgctccagcgtaaaatcaataacatttttatgagaaaaaaagataaatttagagggaatacggctattgctgatggacatgagtttgcgaaattaaaaaagcgcccggcatacgcgggcgctttttttgttattcagatttttcgcctttcagcaggcacataaaaatgataatcaggataaaagcaatcagggccaggaatggaatcgtaataaaaccaaaccagttaatatattggcccgagcacggcacgccgcttacacacggcttaatgccgctaaaaccgggcactttttgttctaagtaatgcatggttgaaatgaatgcccctataatcgccatcgggagcacatattttttcactcgtgtgtccccttgaaaggtggcgatgcctaaaatcagaacgagcggatacatgaggatacgctggtaccagcacagttcacatggaataaactttctgatttcactgaaatacaggctgcccagcatagcgataagagccacaacccaggaagcatataaaaatacgattctatttttcatatcgttacttccctttcagctctttttctattgtctctttgatttcatcataatccgcaaaatttttgatcactttatcattgacgtaaattgtcggtgttgcctgtatgttcattttttgattaaggtcagaatccttttccacttgagaagcgaatgtttccttatcaagattttccttgagcgtctcaggttttatctttgtggtgctttttgcaagatcaccaaggaggcctggggttacccattcctgttccgtatccggctgtttttcgaacagcttttcatggaaatcccagaaagagtcagggtcttccttccatacttcttcagatgcaagagccgctaatcttgaaccttttccatggaacatgacgttcacgaaagaaaatttcacatcgcccttatcaataaagtctttttgtatttttggaaagatgtcactgttaaacaccttgcaagacggacatttgtaatctccgaattctactacagttaccggtgcatcgtccttgccaagcacaggctgccctttgatagacggctgtccggaaaccgcatcattgccttgttccgttttgttattaatgatgacaatggctgctagcaatacaacaaccacaaccgtaaggatgaccgcgaatttcgcagaagactgctgtttctttttcactccgacacctcatcgttttaaaattaaaaaagaagcggatcgcaattgatccacttctttattttaacaagacaagcgccgataagaaaaccccgaaaaaatgaattctctccgacaatttatttgtttttgagacgcatgacgcgcatagcgtttgccacagcgagcagtgtaacaccgacatctgagaaaaccgcttcccacatggttgcaattccaaatgctccaagaatgagaaagatcgctttcacacctaaagcaaagccgatgttttgccacacgattcgccgtgtccgtttcgcaatccgaatcgcttctgctatttttgacggctgatctgtcatcagcacgatgtctgcggcttctaccgcggcgtctgacccaaggcctcccatcgcaacccctatatctgcgcgtgcaagcaccggcgtatcattgatgccgtcaccgacaaaaatgagtttttcactaggcaaaagcttagcttctaatgcttcgacctgcgccactttatcttgcggcagcagctctgcatatacctcaccaatcccaagctgttttccgacggcttctcccgtttgtttcgaatcacccgtcagcatagctgtctgtttgatcccaagcgactttagatcagcaaccgcctgtgctgcgtcttcctttacttcatccgctatgatgattgctccggcatagcgttgatcaacagcaacgtgtacgattgttccagcattttcatccgggacatcctcaatttgttctctttccatgagctttttattcccggcaaggatctcagttccatttacctttgcaaaaatgccgtggccggggatttcttcgtatgactctatctcatcggaggaaagcattttcccgtaagctttacgcacagattcagcaatcggatgctgtgaatgaagctcagcgtatgccgccgcttcaagtaatctatcctttgtaaaaccttccgcgggtttgatttctgtcacttcaaagctgccttttgttagtgttcccgttttatcaaacaccgcgtatttgacttgattcaaagcttctaaataattgcttccctttacaagcactccggcctttgaggccgctccgattccgccgaagaaaccgagcggaatggagacaacaagcgcacaaggacaagaaatcactaaaaagataagcgcgcggtacacccaatcggaaagcgcggcgccagaaagaacaagcggcggaacaaaggccagcaataccgcgatgatcacaacagcaggtgtataatacttggcaaacttcgtgataaagttttctgtccgggctttacggctgctcgcattctgaaccaagtctaatatttttgatactgctgattcttgatagccctttgtgacttcaatatgcagaacgccgttttgattgataaagcctgacattacatcttgtcctaccgcagcttttctcggaacggactcacctgttaaagcagatgtatcaaccatcgctgacccttgcacgaccttaccgtccaggggtatgctttctcccggattaaccacaatgatgtctcctgtctgaacgtcctccggggaaacctgttcgatgctgttctttgttttgagattggcgtaatcaggccgtatgtccattaacacactaattgattttctggaacggctgaccgcggcaccttgaaaaagctcaccgatttgataaaacagcataacggcgacgccctcagggtattgctgaatcagaaaggcgccgattgtggcaagagccattaagaaatgctcatcaaacacctgaccgcggatgatgtttttgactgcgcggatcataatgtcaccgccgatgatcaaataagcagcgaggaaaaggaaaagttcaatggttcccgaatgaaccaaatatgccgctgcgccgagaatgacagccgccgccattctgatcagcatattgaccattctattacgatagccatcatcagctgatttctttttatgcttttggcgaaccgttacatgcggatcaattgatttcacttttttctctactttattcgtgacccattgctcttctttcccatcggctgagacagttaaggtgcttgccgcaaaatttaccgcgcatccgtcaatgccttttatgcctttgactccattttcgattttttgggcacaattgctgcaatccaaaccgtccagaacgtattcctgtttcactagtctcaccttaccttccgatttagggttcccacttcaaagcgtatcaatgagtattgcattctttataatatatatgagcatatactcatataatagttacacctattatatgttgttttccaagaaagtgtcaatgaaaaacaaaaaccggcatatagccggtttttcattttactttttgcagacgaagagcattcagaacaacggaaacggagctgaatgccattgctgctcctgctatccacggtgctaaaaatccaagtgctgcgattgggatgccgaggctgttatagccaagcgcccagaataagttttgtttaatgtttttcattgtcaatctgctcatgcggattgcgtcggcaatgctgttcagatcgccgcgaataagtgtaatgtctgctgtttccatggcaatgtccgttccagttccaatcgccatgccgatgtcagctgtggcaagcgccggcgcatcgttaattccgtcgcctaccattgccgtctggcggccttctttttgtaggcgggcgatttctgctgccttttgttcaggaaggacttccgcaatgatattcgtaattcccgcttccttcgcaatggcttctgcagttctgcgattgtctcctgtcatcatgatgacatcaaggcccaattctttcagacgggcaacagccttccgcgacgtgtccttaatcgtatctgcaaccgctactagcccagctgcttctccatcaatggatacaagcataactgtttttccttctgcctctagctcttccattttggcgagaagagccccatgctcaacctgtttgctctccattaattttcttgtgccgacgaggatgctttttcctccagcttcagccaaaatgcctgcgccgacttttgcttcaaagcgggtaagcttcggtatctcaagccctttatctttcacgccagcaataatcgcttcgccaagcggatgctctgatcccgtttccgctgccgctgcaaattgaagcaaatctttttcttcaaaatggccgaatggaatggcatctgtcagacgcggcttcccgtttgtcacggttccggttttatcaagaacaattgtatcgagacgatgtgttttttctaaatgctcgccgcctttaaataaaatcccgaattcagcagcgcgtccagatccagccattatgctcgtcggagtggcaagaccgagggcgcaaggacaggcaatgacaagaaccgcaatgaacttgctgatcgcttcggcaaaatcgccaggagccgcccaaagataccaaatgagaaaagtgagaacggcaatccccaatacaatgggaacaaaaatacctgaaatctggtcagcgagacgctggatcggcgcttttgacccttgtgcttcctcaacaattttgatgatatgagaaagcgcagtatcctttccgacgttgacagctttaattttcagaaagccgtttgcgttaacggttgaacctgtcacgctgtcaccaggatttttgtcaacaggaagactttctcctgtaatcatcgattcgtcaaccgctgagcggccttcaaccacttctccgtcgacaggaattcgttcgccaggtttgacgtaaacaatgtcattaacaagcacttcgtcgatcgggatgatttgctcctgtccgtctcttacaacagtagctgttttcgcttgaagcttcatcagctttttaatcgcatccgaggaacggccttttgcttttgtttcaaacaacttgcctaataaaatcagcgtcagcaaaatcgcgcttgtttcatagtaaaggccgtctgtatgcccgtgagagccaaggctttgaaaagtaagataaagactataagcgtaagcagccgtcgtaccgagggcgaccaatacatccatattggcgcttttatttctgagcgccttatatgcacccacataaaacggccagccgatcagaaattggactggtgtcgccagcgcaaattgcatccacggattgagaaatatatccggtacccaaatgaatgatgtaaatgtaaaatggctcaccatcgcccaaagcaatggaaatgacaggacagctgaaaaaatcagtctcgccgtttgcttcctttcttctttctttttagcagcagcagcctcactgtcctgttcacccttcaactttagcttatatccaagcttatttaccgcttctttcaaatcgctgacagacgcttctttcggattgtattcgaccgtaactgtttctaaagcgaagtttactggagcatttgcgacgccttctattttgttaagccgtttttcaatccgattggagcaagccgcacaggtcatgccttcaatatcgaattcagctttttctgtaacgacgtgatagcccagcttttctattttttcttgaatcgctgcagtccctgtttcagcaggatcgtagattacatttgatgtttccgtcgccagattaacatttgcatccgtgacaccgggcatccgcttcagtcctttttcaattctggcagcacatgccgcacaggtcataccagagacctgcatcgcgatttccttttgttcactcaacatactcactcctttatatacacctggggggtatataaaaatgaaagaaatatcgcgcctccctataggcgcgataccttgaatcactcagctacgtcatagccctgatcttctatcgcatccgcaatatctttgactgatactttgtcagcatcaaacgaaacatcgactttacccgcttccagattgacatgaacggcactgacgccgtccagttctcctacgcttgtttctactgctttgacgcagtgctgacaagacattccttcaacttgcaatgttttttgttccataatcaattcctcctgtttattctttctattttcatcctaccatacccctgtagggtattacaataaaaaaacgctttatgattttgtgaactttttaaatacgtccaaaagctcagaaatggcctgttccccgtctccgcttttgatggcatctgctacacaatgatgggcatgatcctcaagcaaatgaagcgccacatttttcattgccgcctgaacagctgaaatttgcacaagaatatctacacaatatctgtcgttttccaccatgttttgaatgcctctgacctggccctcaatccgcttaagccggtttgtaatctgatccttttctttcgagcttttatggtttaatgttttatgttcgttatgcttttccatgcgtacacctctgtttaatgatattaattcccattatactgattgtccaaacggttgtctaagcatgccgatccaaaaaatgaatcagttaggttttaccatttgatcaggagggtatatacttctgttgataacgcttttaaaggggagaagaaaagtggacacgatcaaggttggaatattaggatacggattgtccggttctgtttttcacgggccgctgctggatgttctggatgaatatcaaatcagcaaaatcatgacatctcggacagaagaagtgaaacgggactttccagatgctgaggttgtacatgagcttgaggaaatcacaaatgaccctgccattgagcttgtcattgtcaccaccccgagcggccttcattacgagcatgctatggcatgcatacaggccggaaaacatgttgtgatggaaaaaccaatgacagcaacggccgaagagggggaaacattaaaaagggctgccgatgaaaaaggcgtattattaagcgtatatcataaccgacgctgggataacgactttttaacgattaaaaagctgatctctgagggatctcttgaagatatcaatacatatcaagtttcctatgaccgctacagacctgaagttcaagcgcggtggcgggaaaaagaaggcactgccactggtacgctgtatgatctcggctcccacatcatagaccaaaccctgcatttgtttgggatgcctaaagccgtgactgcaaacgtgatggcccagcgggaaaatgctgaaacggttgactattttcatttaaccctggactatggcaagcttcaagccattctatacggaggatcaatcgttccggcaaacggacctcgttatcaaatccatggaaaagattccagctttatcaaatatggaattgacggacaggaagacgcactcagagcgggaagaaaaccagaggatgacagctggggtgcggatgatccggagttttacggacagcttacaaccattcgtggctccgacaaaaaaacagaaacgatcccatcagtaaatggctcctaccttacttattaccgcaaaatagcggaaagcatacgggaaggtgctgcgctgccagtcactgctgaggaaggtattaatgtcatccgcatcattgaagccgcgatgaaaagcagtaaagagaaacgaaccattatgctggagcaataaaacaaaagcctccccaagtaaggggaggctttttcattagaatgtttttcctgcttctttcgcacgcgcaatcgcgtcttctttgatttgctgtgctttatcaggctccgcattatgtccctctacgaaaatgccatcgaaggatggtacgccgaaaaaattcatcatgatgccgatgtagcggtgtcccatttccatctcagccgcagggccttctgaatagtagccgccgcgcgcttggatatgaattgcttttttatcagttaacaagccgacaggaccttgttctgtgtatttgaatgattttcctgcaacagcaacagaatcgagatacgctttcatcactggcgggaatgagaagttccataaaggagtaacaaatacgtacttatcagctgatgcaaattgatcgctaagctctcccaaacggcctactttcgctttttcgctttcagaaagctcttcaaagcctgtacctgactgaagctttccccatccgctaaatacatctgcgtcaatgtgcgggatgttttctttgtacaaatcgatatgtacaacttcatcatttggattcgcttctttgtaagattcgataaatgctttacctgttgccatactgtacgaagttgcttcgtcatgcggatgagcagtgatatataatacttttgccatttttaccagccctttcgtttttaaaaatcacacatcaattattatcatacagatgcataatgattattctgtctctcttagactttattataaagacaaagaaatttactttcaagtaaaatatctcgaattaaagattatttaactttcccaaacagcttacttttcaaaagctgttctcaagccggaatacagcgcggacagttctttactgattcgaggataatgagggacatgcggcacttgaatatccgcaggcatccttttcactataaaggattgctcagccttttcaaaaaacgcccccagctggttgatctcttcatcagaaaacggagcaggcggacggcggtgagcttgggccgaaagcaaatagtaccctaagtgctgagcaccggaaatggcaggccagagcgcatccgcattcgcgtgaggaaactcgccaagcgccttgtcatacgcatcccgaagcctgacaagactcacccttaacttgtgttcgtcggcaatttgcccggttaacagtttctccataaactgcccttccagccggatgacattccgcacaagttctggcagccgcttggttgaaaaccgccgccacaaaagcattgttcccaacagcccgatcacgctgccgacagctacatcagtcagcctcgctatcataaaataaccggcacccgcgccgccatgcatactttctgtgataacaagcgcatttgcggttaaaaagggaacagccagcgcataattgcggacgatcagcatctcaagaagacattgcagcgctgcaatacaaaacgcaatataaacaccgcccagcttaaaaaacaggattgcacctgccagcataacaccgatcaccgttccggccgaacgctgaatagccctgtgaagcgtaaaaacaacagtagtgccaagcatgaccgctgctgccgaaagcggaatccaataggagcgtgcaaagccgaatgcgagggcaaacatatcggcggcaaacagaacaattccgtactttaacgctctaatcaaaactggagacttccagtcaaaagcatttctcaaaaagtaaaaagaggatggcaggcggcttggttccccgtcaagctgcttatcaaaacgtcctgaagcgatatgcaaaacctcattgatttcttcaaacagcttccgcctaggctcagattcgttctcattaatctgaaacgtaccgaaaacccgtgcatgcgcaagcatatctccggtttggcgaagtgccttttcaatctgcgcggtctctctgtccggcgtttcagctgaaaaatgaataatggcaatgaatatgtcgtcagctttttcaagcaggcggaaaaaccgttcatcatgccgcgattttttccgtttattccctttcccaagaaccgtttgtcgggctgttctaagcatgagcaccgtctgatgctgtgcgttatgaaaacctggcgttccgacggctgaaagacatgcagccagctgatgatatgttttttgcagcaccgctccctccggtccatgtttgttccataaccagccgattaaagcgatacccatggcgaaaatgccgccgagaaacgtcagtcccgctctgaacagcgcttgtgaaggatcggccggcagcccggaactgactaaaaaggcaaggacaaaaaacatcggcgcagggccttgaatgccgagcgcgctaaaaataaacatcgccgctgcaccgatcagccccaaaacagccgccatcatccaaagcatcccggacaaaagtgtccctaaaccaaatgagagggcgatcccaatagaaaccaagagcagcttcaaggcgcgctttttgtacgattcaccgcccgcatataaataaacaaagcctccgatacttgcaattaatccgtaatccgtgtgacctgccaatgcaccgaccagcacaggaaaccctgaagcgaaacctgatccgatagcctttttccaaggaaatggatttgcatgaatgcgaaaggcatccttcacgataggcatgattctttgattgttcgcagcagttttgttcatttgacaaaatccttttcaatgaatgtgtagaacttttcccgtttcttcgctttagtatgcccaaaaacgcggttagcttctcaattggtgcgcccgataaaaaaacagagacttataccgtctctgcttcattacatcagtttattataaaagcggcacctgtcaggactgttttgtccttctgccttccttcaagagcaggtgaataaaaaataaaggataaatcaatagatacccattaaacagccaccacacaagatcaaagtcactgctgaatgtccagaatgatagcgcctgcagacctgaacaacaggtcagcacaagagaaatcagcgccatcagcttccagtcagctcgattcacccgctgtaggtacaagctgtacaaccctgtgacagaaatcaggatatccagcggaaaaaaagaccagttccaagcgatcataaacggatggtcatgatgtttaaaagcccagctttccggtatgagagaaaacccggctgacagccagtacaagataaaaccgatatcagtcacgagaaaaaacagcttcatatatctcatttgtactgcccgcttttatgtaccggctcagacaccgcagcatgctcgatcaggtttaaagacacaacaccggcaataatcaaaccaattgaaatgactttcatgacactaacatgttcttgaaaaaacaaaaaaccaatgactgtaatcaggacgattcccatccctgaccatacagcataagcaacagatacatctattgattttagcgtaagcgtcagaaagaaaagactccctccataaaagaaaatcaacagcaaactgggaataagctttgtaaaaccagacgatagcttcatgctgaccgttcccgcaacttcaaacaaaatcgccaagcatagaaacacccaattcatgtcgcatcagcctcctcatcagctgttataccgttaaacaaaacatctacaattgattcaagcacctctcctgtcatgaactgatgtttcagcggatattcagggtcatacacttgattgatgctccctatatacatgtgaacaaacaggtccggattgatgtttctaattctcttttgctgtttgcactcgtctaataattctaggacaatggcccattctgccttaataaacgtgtctaatgtaagccacgcatcgtaatggtatttctttagttcatttaataatcccatgttcagcagttccatcccctgcggaaggctgatcagcatttttttcaccttttcaagcacatttaaactttcattttcatagatgtctctttctatttgcttcatttcagctataaattgttcgacaaccgcctcaacaagctgatctttagatgaataatatgcatagagagtccgcttgctcgttcccagcgctgccgccaaatcattcatcgtaaatgaaaatcctttctgcttgatcagccggaaggtttccgccagaattcttttatccatattaatcccccgctttcggtaccaagaaaactatttcggtaccaatattatacggcagaaatttatggaaagcaacaatatataaaaaaacctctcctattgggagaggtttaaaagacactgcggaccaaaccgccgtccgcccgaagtgccgcgccattgatcgcagaggaaagcggactgcttaaaaatgtaacaaagtgggcgatttcttccggacggatcagtctttgaataatagatgtcggccggttttctttcataaaacgtgcctcagcttcttgaacagtcaggttttcaccaggatacagcgagttcagcatggtttccacaccctctgttaaggtagagcccggcatgacggtgttgactgtgacattcgtgccggttgccagctccgccaaactgcgggaaatggacagctgcatcgtttttgtcgcactgtaatgcgccatttcctgtgacggcataatcgccgcttcactggcaatgaaaatcacacgcccttcctttttctctatcatgttatgcaaatacctgcgtgtcagccttacaccgctcataatattcacttcaaaaaaacgaaaccattcatcgtcgggaatatcaaaatactccgccggttcaaaaatccctaaattgttgaccaaaatatcaacctctggatatgcctgaaacagctcattgcagccttcttctgttcccaaatcaaatgcagccggataaagaaccgcttcagcatgttgtgttttcagttcatctatcgtctgattcactttctcttcccggcgtccgttaatgatcactgccgcaccttcttcagctaacgaagaggcaatagcttttccgatcccagatgtcgaaccggtcaccagtgcggtttttccttgtaaattcagcttcattattcatccctccgtttttgattcctcttatttattgacagaaatctgattggtgaaacatctgctctgcaatcagtatgaaacagctgggattgaaatggaagtacgcactttttggtgcctgtggtttggagaaaaaataaagcagaaccctctaagaggttctgctttattgtcagtatgtatggagacggtgggagtcgaacccacgtccagaaacatcgattacttaagcgtctacgagcgtagcctgcatatttatggtttcactcatcttcttgcctgcgggcgggccttccgagagctagtctgttcatctcttcttacgttctcagacaggaacgcaagcgtagcctacttggatgtgctcttcacagacacataggcaatgtcaggaagagctcgctgcgcttattaggcagctaatgctacgttttggttaaaactgttagttttgccagttatatttaagtgcgtttttacgagatcgcctctcggctcgcagctcaagctcgatccatccctgtcgaatccgtaacgtccccttggtataagggaaatacgggagaaaatatcaagctctcactcaaactggctatagtcttattataacatgatcacggctcttttcaattgtcaaatccttcaaatgaatggcgtcgtgatctgatcgtgaacacagtatagcacaggcctgattttcgaatcaagcactatgcctttagaagcctttttgactgtctctgaacgctctttcgatttcccgcttcgcgtccttgcgcttcaggtcttcccgtttgtcatagttcttcttcccttttccaaggccgagaagcactttcgcaaagccgttttttaaatacagcttcagcggaacgagagaatagcctttttcctttgttaacccgatcagcttattaatctccttgcggtgcattaacagctttcttgtccggagcggatcgtggttatagcggtttccctgctcatatgggctgacgtgcatattgtggagaaacacttctccccgttcgattttggcgaaggaatctttaaggtttacgcggccggcgcgaatcgatttgatttcggttccttgcagaacgatgcctgtttcataggtttcttctataaaataatcgtggttggctttcttattttgagataatacttttcctgacccttttggcatgccagaacctcctctctctaaggaaaaactgtccaccttttgcgatacgctctattttaccaaatgtcacgtaccgctacaatgaaaagctgtttccgaaagaaagcaaatagagcgctgcggccctatttgctggttgagctgctatttcttctttttccgtttctgtttcggagcattctggaagccgcgttttttctttttcttcttcggcttagtgaaccactcccctttttcctcagacggagctggagaaacaggtgtattggtgctttgaacacgttttctggcaggctttccgcgttttctgctccggctgctgtccaattctctcggacgccgcggagtgcccttcatgccgacaatttcaaagtcgatattgcgctcatctttattgacatcgacaaccttgactgtgatttcatccccgatgcggaagacgttgcctgtccgctcgccaatcattgcgaaatgctgttcgtcaaagcggtagtagtcatctgtcataaagctgacatggacgagtccttcaattgtattcggcagctcgacgaacattccgaagtttgtcacagagctgatcatgccgtcaaactcttcaccgattttatcaagcatgtattccgcttttttcaggtcatccgtctcacgctcggcgtcaactgcacggcgctccatagatgatgtatgttcggcgatatccggcaggcgttcagcccacttttcctgtgtcgcttcatcgactttgccgttgatcaaatacgttcggatcagacggtgaacgattaagtccgggtaacggcggatcggcgatgtgaaatgcgtatagaattccgttgacagaccgaagtgccccaagctttgcgggtcgtatttcgcctgtttcatcgaacggagcataacagtagatataaccgtttcctctggtctgtcacgtacagcgtccagaatgctttgcagcgcgcgcggatgaatattccccgccgttcctttcaccacatagccaaatgtcgtcacaaattctaaaaacttttgcagcttttcagcattcggctcttcgtgaatccggtatataaacgggacgttcatccaatggaaatgctccgccactgtttcgtttgccacaagcataaattcttcaatcagcttctcggcgacagagcgttctctgatcacaacgtctttaaccgctccttcgtcatcaacaagcacctttgcttctttgaaatcaaagtcaacggcgccgcggtccatccgcttatcgcgaagaatttgagccaggcgctccatgtctttgaacatcggaacaagaggctcgtatttttgcttcagctcttcatcatcatcaacaagaattttattcacatctgaatatgtcattctttccgttgttttgatgacactttggaagatctcgtgctctgtcacctgtccctgactgttaattgtcatttcacaagaaagcgtcaggcggtcaacctttggatttaaggagcagatgccgtttgacaatctgtgcggaatcatcgggatgacacggtcaaccagatacacacttgtccctctttcaagcgcttctttgtcaatcggcgagttttcggttacgtaatggctgacatcagctatgtgaacgccaagcttgtagcttccatcatcaagtttcgtcacggtaactgcatcatccaaatccttcgcatccgcaccatcaatggtgacaatcacctggtcacggagatcacggcggtctttcagatctttttcatcaatcgtgtcaggcgtacttgatgcctgttccatcgcgtcagctggaaattctcccggcaggccgtgcttatgaatgaccgataaaatatcaatgcctgggtcgtttttgtggccgagaatggtttcaacctcaccctctgcgttcatgcggccttcaggatagctcgtcagcttgacaacaaccttatgcccttccgcagctccatttttcccatttttcggaatgaagatgtcactcgtgatttttttgtcgtccggaatgacaaagccgaagtttctcgtttctgtatacgtgccgacaacccgctgaatcgctctttctaaaatccgtatgacggttccttcctgcctggagccgcttgactgtgaatttagacgcaccatgacgatatcgccgttcattgccgtatttagctcattaggcggaataaacacatcacttaacgacgtatcctcaggcagcaaaaaggcgaatcctttcgcatgggctgaaatctttccttttattaagttcatcttctccggaatgccgtagcggtcgcttctcgtccgtacgataagccctttttcttccaaggcgactaacgctttgacgagctctttaaactcctcggcttccgtaatatttaacatctcctcaagttcctgaacggtcagaggtttgtacgcctcttccttcataaacgagagaagcttttccataaatgcttctttttccattatccgacctcctgttgattaccaatcgagcttctctaaaaattcatacacatcctgatggacgaggtcacgttctttgtcgagtgtaatgacatgccctgattcctcgtaccatttcagctgtttatcatcagtttccacttcgttgtaaataatattggcgctttcggtattaatcatgtggtcatgacgggcctgcaccacaaatgtcggtgaataaatcatatcgacattattccgcacatcagcaattaagtcttgtagcgccttgagggtattcatcggcgttttttcgaattctttcatttcctcttcaatttgctccgggcttttcccctcaaactttttgtaattgcgagcgtatgaaagaacgccttgatacatgacctcttcactcttaatatgcatcggtgcgcacattgggacaattccctttatgggtacagtgtaacccaatttcagcgaaaaaaccccgccaagcgacagtccgcaggcagcaatgctctcatagccttcagattttaagtattcatagccatccattacgtttttccaccagtcttcgggccccgtatgtacaagttcttcaggcgggacgccatgtccttcatattgaggcgcgtggcacgtatagccgcgttcattcaaatatcgtcccagcatccttacatccgctgtattgcctgtaaagccgtgcagcaaaagcaccgctttgtctccgcctttaaatgtaaatggttttggtgtcacaactttcatgctcatgtctccctttctatctgcacgatcattttagttttccacagtttaatcagaaaaaaacgttttgaatatcatccagaaacgtgaaaaaggcctgacttcacatcagaccttatacaaacattgccctataggatataagcaagcgcaatcgttaacacgaaaaacaagactgccagcactaccgtaatgcggtgcaaaattaaatcaagacctcttgctttttgtttcccgaagagctgctccgctccgcctgaaatcgcaccagataatccggcgcttttactggattgaagcaaaacgacaataataagtgcaatgctgacgataaccaataaggtaatcaaaactgcgtgcatcccatacacctccagactcactggctacattacttctattttacatgaaaagggttggcatgtcacgctgtatcagacgccaaaaggccggataagacgttttatcttggttaccctattcatatgaaaaggacaaaggagaaaagcgatgccgcttatcagcatagacagcaggaaacatcttttttatgaagaatatggacagggaatccctatcatttttatccacccgccgggcatgggacgcaaggttttttattatcagcgccttctatccaagcatttcagggtgatttttcccgatttaagcggccacggtgatagtgatcatatcgatcagccagcgtctatttcctattacgcaaacgagatcgcgcaattcatggacgctttggatattgataaagctgtgttattcgggtattctgccggaggcttaatcgcgcagcataccggcttcacccgccccgacaaagtgtcacaccttattctgtccggcgcctaccccgctgttcataacgtaatcggccagaagctgcacaaactgggaatgtatctgcttgaaaaaaaccccggtttgctcatgaaaatcctcgctggcagccacacaaaagacagacagcttcgcagcatattaacagaccatatgaaaaaagcagacctggcccattggcatcagtattatctggattcgcttggctacagctgcattgaacagctgccccgcctagaaatgccaatgctgtttatgtatggcggcctgcgggactggacctttacaaacgcaggctattaccgaagatcgtgcagacatgccgaatttttcagattggaatatcagggacatcaattgccgacaaaacaatggaaaacgtgcaatgagctggtgacacggtttgtgctgacacatcattcaatatagaaaacgttggatctccttgcgttttctatattttattgacttttgtcaacaaaatcatagtaaaaaagatcctcaaatttcaaattaaaatagtgaagcattttaccgatcacaagctgccccggccgtctttctccattcagcacgcggctcagtgtggcgggtgagactccgatttccagcgcaagctgattaagggaataatcgttattaaccatatactgcaagacataatcacgtctaatctgtatcttttctactggcactttcctcaccttccattcctgaaaaacttttttctatacttttacattacggcttatgttaacttttgtcaatacatttccagtctacctattccctttagtcaataaacatactaaaatatgagtaacagtgagggacggggtgagatatatggaaagctttggcgaacaattacgggcattgcgtgaagagagaaagttaacagtcaaccagctggcgacttattcaggcgtaagcgcggccggcatctccagaatcgaaaacggaaaacggggcgttcccaaacctgccaccatcaaaaaactggcagaggccttaaaaattccttatgaggggcttatgtacaaggctggttacatcgaagaagtgcatgaagccagggccccttacgaaacgaagtgcaagctgcttgaaaaagcggaggcctatgacctgaaaaaccttgcgcttcttgagaacgaaaagtggcaatatctcaataaagaagatttgctcatgctggatcattatttttcgtttatttcagacgaagccaaaaaacggtctgctgatgactgactcttgatagaaatgtgaggcgatagaccatgtcaccgttcggacagcaattacgggagctgcgccgcgcccgcaaactgacagtgaatcagcttgcggtgtactcaggcatcagctcggccaccatttcaaaaattgaaaacggcaaacgcgggacgccaaaacccgccacgattaaaaaactggcagccgtcctgaaagtgccgtacgaaaacctaatggccgccgcaggccatattcaggcctttcctgaagaaatccgcgaagcatctgaaagctatcaatccgtttatgaaatttaccagacggctgtcactcgcggagcggagcacctcccgattttcaatagtcaaaaatgggaacatctctcaaagcaggatattgaaaatctcagcaaatacttcgattttttgtcttcagaagcaaaaaaacgcgcctcttcctcataatcccctgtttctctttctatattttatcaatcacgcttgcataccctccctcgttatttgcgttataatagtgacagacgaggtgaaaagtatgaaccaatcagaaatgtgtcctagatttgaaaaagcagtcgacatcttaagtaaacgctgggtcgctttaatcgtatttcagctcttgaacgggtctcagcgatttagcgaaattgaagcagcacttccaaatctaagcggcagagttctgtcagaacggctgaaagaacttgagcttgaaggagtagtgaagcgggatgtcatccctgaaactccggttcgcatcgaatattcattgactgataaaggaaaggcactagcacccattttaggtgagatttctaaatgggcgactgaatggattgacccttcctttcttgactaattgctaaaacggctctgatctcaaagatgagaaaagagccgttttttattttttcccaggtgaaaaaacgatttctcagccgatatatagtacatccacacattacgtttttaaaggagaccactatatgcgactgacgatttcccgcaaattcagcctggtatttttgacactgatcctgatcaatttacttgtaggcggaataggcgttcttaatatgcagcatatcattcaaaaaacagatgaaatcaacacaaaatggattgacggcatcaaaggaatcacttcaattaattatgtaaccgagcacctgtcttctaaagaaaaggactttctgatttatacagacaaaagcaaaatggatacacttgatcaagaaatgaatcaaatcatggaagacattaaccaaaagctcgataactacgaaaaaacgatctccactgataaagagcagaaactgttcgagcagcttcaaactgaagtgaatacctatatggatattcatgcgcaaattatcgaaagcggccgcacgaatgacatggacaaagcaagaggtttattggttcagactgaggccagctttgaggatatgaaaaaaacaatcactcagcttgttgacttaaatcaagaaggcagcaacacagcggtaaaagaaacgaaggccgtctatcataaagggctcatttacactgctttgcttgtggcagcttcgatcctcatcagcattttcatctggctttatatcacgcgaaacattgtaaagcctatcattcgcatgaaggaatctgccaatcatattgccgaaggcgatctgtcgaacgatatggagccgctcaactcaaaagacgagctgggtgatctgaatgaagcgctgcaaaaaatggtagggaatctgagagatattgtcggatattctaaagacatatcaagccgggttctttcttcttcacaggtgcttgcaaccgcaacgaatgaaacaagatccggcagcaaacatattaccgagacgatgaacgaaatggctgagggctctgaacagcaggcccaagacgccgtgacgattgccgaatcgatgaatgagttcactgaaagcattgataaagcctataatcacggcatcaccatcagcgatacgtctcaaaacgttctcgaactcgcggtaagcggaaacgaaaatatggctacgtcattacagcaaatgaaaaccatccatcatattgttgaagaagccgtgcataaagtgagatcactggaacagcattctcaggatatcaacaagctcgttcaagtcatcaacggaattgccgagcaaacgaatttgctgtcccttaacgccgcaattgaagctgcccgcgcaggagaaagcggcaaaggcttcgccgttgtggctgatgaagtcagaaagctggctgacggcgtttctgattccgtgcaggacattacccggattgtaaacgggacacagcaggagatccacactgtcattacgtacttggaaagcagctttacagaagtcgaaaaaggaacggaaaacctgacagacaccggacaggctatgcagcatatcaaacaatccgtcacccatgttgcagacagcattaaggaagtaacggatggcctgaagcagttaacaaaccaatcgattaccatcaatcaatcgattgaaaatatcgcttctgtatccgaagagtctgccgccggcattgaagaaacattttcaattaccgagcaatccgcccattcgatggatcaagtgcttctaaatgctgaagagcttgagcagctggccaatgagcttaatgagaagatgggtcagtttacgatttaaatagaaaaaagaggctggactccagcctctttttctattctatgcagctgattgaacatgtttcgccccggttctttttttcttcaccggacttaatgcccgctccagccaagccatgagcaaatccgcccctaccgccatcaccgcagttggtatcgctccggctagaataatcgcagttccgtttgttgcgtttgagccgcggacaatcatgtccccaaggcctccggcaccgacaaatgtgccgatcgctgtaattccgatggcaatgacgagagccgtgcgaaggcccgccataatgacagaaagtgcgagcgggagctcaaccattctgagtacttggaatttcgtcatgcccattgcttttcccgattctaagtaggcatgttcaatactgataatgcctgtgtacgtgtttcgaataatcggcagcagggaatacagaaataatgatagaatcacggtatttgcgccgagccccataacaagcattaagacggccagcatagcgagcgccgggattgtttgaataacgtttgttacggcaaacacccaggctgacaaacggcgaaaatgcgcgatgaggattccggccggaaccccgacgacagcggcaaataaaacgccgtaagccgacatgagaaagtggcggccgaattcatccatgacgtaactgccattctgcgcgtaatacgtcattaactgttcaagcacgttcattgacctcttccccctttcacgattcgaagtagtgatgtttttctaaatattccttggcaacgacagacggttctttgagattgccgtcgacttcatagttaagctcctgcatcgtggttgtgtcgatttttccgagcattttcttgatgatgccttcaagctcaggatgttctttgagcaccttttccggaacaaccggagagcagtcgtacggcgggaaaaattgtttatcatcctttagcattttgagaccataggacttgattcttccatcggttgaatacgcaagcacaatgtccatttttccgcttttcaccgcgtcgtacacaaggccgatctgcatcggatacgtgccgccgaatgtcatgccgtaggttttcgtaaaatcctgatagccgtttcctttgagcttcatccaatagttatcaacgcccagctttaattgcggcgcccattttttaacgtctgatacggtctctaaatggtattggtcggccagttccttgctgactgtaaaggcatatgtattatcaaacccgtaggagttataccattttaaattgtatctttttttaaactcccgctgagtaagcgccagcgctttgtccggatctttttcaggttccattctcaacgtgcctgtcagcgcgtctcccgtatatcttgtggccgcaatgtcaatttccccgttcattaaagcctgctgctgcaccgcgttggagccaagatttttaatcgttgttgttttgagatcagtatggtgttcgatcaactggccaagcatactagcgatgatttctgattcgctcatgctttgcgcgccgattttaatggtctggtctgcagcagcgctgagaccaggaagcgaacagccgctcagcgtcagcgttgccgcaagtgctaaacctatgattaatttgaggtattttcttttcatgagccccctccttatgacaattcattcaatctctgcatgccggcaggtgtcagttttcgttcagcaactgcaagcacataatcaatcacaattgccaatatcgtgacaggtaccgcgcccccgatgatatattccggctgatataaattcagtccgataaaaatgtaatcacccaatccgccgcctccgataaaggaagcaagcgtggcccagccgattaagtaaatcgtcgatgtcctgattcccgccatgatcactggcgcggcaagcggcagctccaccaagcggacttgttcagccggcgtcattccgattcctttaccagactcgagcagatttttgttgacgccgcgaatgccggtatacgtgttgcgaagaatcggcaatacggaatagaaaaacaaagccacaatggccggaaccttccctacaccaaggagcgggataaaaaaagcgaggatggccagactcggcagcgtctgaataatattgacaatgccgataatggtgccggctccttttttcattctggtaagcacaaccccgagggggacggcaaccagcacgcctaagatcacagcaatgagcgatatcgtaatatgctcgtatgttttataaagaagctcgcccccattggtttgcaaaaattgaacaatatgatgcatgacttatcgcccctccctatgacaatgctgcgagctgcttttcttctccccagagggagtcatacacgatgtcgaccagacttgccctcgtcacaattccgatcaggcgtcggtcttcatccacaacgggaacatatttgacaccccgttttaaaattttgcggaccgtgtcgcgcagcagtgtgccgcccagtactgtgtatatatcttcatgtaaaacttcactgacgagattggcctttttccggcattgatcaatgatttcaacatcgacatagccttgcagaccgcgctcgtcatcgacgaccagcaatgaatcgacccgttcctgcctcatcagctgaatggcctcagaaagcgttttatccgcggtgatcgttacaggctgtgtgttcataatctggtcaacccgttcaacatccgggctggatgactgaatcagccgctccttgccgataaattcctcaacaaattcgtctgccggatttcttaaaatgtcatcgggcgttccaacttgaacgatttctcccgcttttaaaatcacaatccggtctgccagcttaatcgcttcatccatatcgtgggtaacaaatacgatggttttatgtaaggttttttgcagttttttaaattcttcctggagggaatccctcgtaatcgggtcgagtgccccaaacggttcatccattaagataagcggcggctccgcggcaagtgcccgtaatacaccaattcgctgctgctgccccccgcttaattcatgagggtaacggtctacatattcaggccccatatcgaccaattttaaaagctcacgcgcccgctctttccgctgctgctccggccatttcagcagttttgggacgagtgagatattctgctgaatggtcatatggggaaacaggccgatctgctgaatcacatagccaattttgcgcctgagctctacaggatcctggtccatgatgttttcgccgtcaatgaaaatcttcccggcggaaggctcaattaatcggttaatcattttcattgttgttgtttttccgcagccgctcggcccgataaagcagataaattcgccttttgcaatcttaagatttacgttgttcacggcttttttgccgcccttgtatgttttcgagacattttctaatgtcagcaaacatcgcacctccaaaattaagtttattcaatttgttcagtttaaatttaatttttcagacaattgaatgcttcccattatagaataaagtttataaaataaaaagtttacaatttgttcatattatttataaagtatgtgtaaacgctgatttacccgcattgacgtgtgttgatctccttattgctccaatttcctgccaaattctcttttgacagcattttcgccgtatcaaaaatgtggtatattgacatcggaattgttagctgaaaggatgaaaccgttggagaaagatccgttaacgatcattgaacaagccgaggaccattttatagaaaaaatcgcggaaaacatgcatgcatttggaatgccctctaccgtcggacgagtgctgggcattatttatatgaatcgaaaaccgatgacgcttacggaattatctgaggccaccggcatgagcaaaacacgcatgagccaggtagtgcgggaaatgcttgatgccaacattgccgagaaggtgttcgaaaaaggcgtgcgaaaagatttatatgaggttgagcaggactactatcaaacatttatcacgctgttttcagccacctggagcaaagtcgtcagcaaaaacaaaatgatgcataaaaaactcaatcgggagctgcttagcgtgttggatgaagagcttactcctgaagcggaagaaaaagtgaatgagctgctgaaggaattaaaggaatggctcgattattataattggctcagccgtttgattgagttttttgagagcgaagaaatttttaaatatgtgccgaagccgtaaaaaacgccctgtcattacaaggcgttttttcttatgcggcacctgccaggtttttcttttttctctttttaatcgggcttaatgctcgttcaagccagcccatgaccaaatcggcaatcaccgccatcagagctgtggggatcgctcccgctaatataatcgcggttccgtttgtggcgtttgatcccctgacgatgatgtccccgagaccgcctgcaccgacaaatgtcccgatggccgtaatgccgatggcaatgacaagcgcggtgcgcaggccggccattatgaccgaaagcgcaagcggaagctcgaccatccgcagcacttgaaattttgtcatccccattgcttttccggattcaagataggcgtgctcaatactgataatccctgtatacgtatttctgataatcggcagaagagaatacagaaataatgacaatatcactgtattagcgcccagccccatgacaagcatcagcacggcaagcatggcgagagccgggatcgtctgaatgacgttcgtgaccgcaaaaacccatccgcttaatcttctgtatctggctatcaggatgccgagcggaattccaacaatggcggcaaataaaacgccgtataccgacatcagaaaatggcggtaaaactcctgcagcacataaccgccgttttgcgaatagtatgtgccaagctgctgtagtacttccatatgatccacctcttttcttagtcaaaataatgatgtttctctaaaaattcctttgctacgacagacggctccttcagcttgccatccacttcataattaagttcctgcatcgtttccgtgtcgatttgcccaatcagcttattgatcacaccttcaagctccggatgcgccttaagcaccttttccggaatcaccggtgaacagtcatacggcgggaagaaacgcttatcatcttttaagattttcaagtcataggctttaatccgtccatccgttgaataagccagaacggcgtccattttcccgtttttgactgcgtcatagacaagcccgatctgcattggataagttgtgccgaattcaaagccatatgtgctgacaaagcctttatacccgtcaccttttcgtttcagccaagcattgtcgacgcctaatttatattgggaggcattttttttcaggtcggacacggtgttaatatgctcattttccgcaaacttttttgttacggtgaaggcatacgtgttatcaaagccgtaggaatcaaaccatttataagaaaagcgcttttgaaactcgttctgcacaatgttcagcgctttttttggatctttctccgcttccttgccgagggtgcttgttaaatctgttccggaatagcgcgtggctgaaatatcaatgtcaccgcccagcatcgcttggtgctgaacatagtttgagccgaggtttttcactaaagcggtattcaaatctgtatcatgttcaataagctgcgcgatcatattcgctaaaatttctgattctgtcatgctttgcgccccgattttgatcgtgtcgtcagaagcgccgccgagacccggcagagagcagccgcctagcagcatgacaaagacgagagcaaacgcgccaagccatttgatttttgtcgttttcaacagagccaactccttacgaaacttccttcatcccttgtaatcctttcggcgtcacctttcgttctgtcacggctaggacataatcaatgataattgccagaattgtgacaggcacggcaccgccaatgatatattcaggctggtataggttcaggccgataaaaatatagtccccgaggccgcctcccccgataaacgacgcaagtgtcgcccagccaattaggtagatcgttgatgtgcggatccccgccatgatgatgggaattgccagcggaatttcaacgagccgaatctgctcccagcctgtcatgccaatccctttccccgattccaggaggtttttatttacacctttaatgccggtatacgtattgcgcaagatcggcagtaccgaatagaaaaataaagcgacaatcgcaggcacttttcctacgccgagaagcggaataaaaaaggctaaaatcgccagactcggcagggtttgcacaatgtttacgaaaccgataaccgcacctgcgccttttttcattctggtaagagcaacgccgagcggcactgcaacgataatgcccaatacaacggctatgagtgaaatatataaatgctctcctgttttatacagcagctctccgccgttcgtttgcaaaaaagtcatcatttgattcatcttaaaagagctcctcccctggtcagatcgtcatgagctggttttcctcgtcgccccaaatggaatcgtacacgatatcaacaaggctcgctcttgtcacaatccctgctaaatggttctgttcatcgacgaccggaacatacttgatcccctgcttcaaaatttttcggactgtatcgcgaagtagcgcccctttttgaacggtatatatatctgagcggtatacatcgccaacgatgctcgcttttttgcggttttgatcaatcatttccacatcaacatagcccttcagcacgttttgccggtccacaacgagcagcgagtcaacacgtttttctctcatcagctgaatcgcctgagaaagcgttttgtccgcagataccgtcaccggcgttctgttcatcatttgctctacccgctcgatatccggtcttgactgaatcaggcgctctttcccgataaattcttcaacaaactcatttgccgggtttcgaagaatctcatcaggtgtgccgacttgaacgatttctcccgcttttaatatcacaatcctgtcggcaagcttaatcgcttcatccatatcgtgggttacaaacacaatcgttttgtttaaggttctctgcagttttttgaattcttcctgaagggaatcacgcgtaatcggatcaagcgctccgaacggttcatccattaaaatgagagggggttccgctgccagggcgcgcagcacgccgattctctgctgctgtccgccgctgagctcatgcggataacggtctaaatactctgggcccatatccacaagctttaacagctcgcgcgcccgttctttccgtttttcctcaggccatttcagcagctttggtacgagtgagatgttctgctggatggtcatatgggggaacaaaccaatctgctgaatcacatagccgatttttctcctcagctcaaccgggtcctgttccataatattttctccgtcgataaagatccttccagacgatggttctatcagtctgttgatcatcttcatcgttgtcgtttttccgcagccgctcgggccgataaaacagataaattcaccttttgcaatatctaaatcaatgctgttcacagcttttttgccgcctttatatacttttgacacttgttccaatttcagcaatccgtgcacctccgcaggtttcctttaaattttctgaaaagtataatccttattatagtttgaactttgtaaaataaaaagtttacaatgtgttgaaattatatgttatttatagattatttattgttatgaccgagacggaaagggtgttcttacaattacgccggatacctcccacttcctctgcattcagctattttcaacaccaggaagaaatatgatatattgacaccatcaattgccatttgaagggatgatcagctgtgaaaaaaaccgctctcgacatcattgaacatgctgaagagcatctcattgagaagattgccgaaaatatgcatacgtttggaatgccttcaactgtcggacgtgtgctcggaattatttatatgaatcgaaaaccaatgaccttaagcgagctctctgaggcaacgggcatgagcaaaacacggatgagccaggttgtccgggaaatgatcgatgccaatatcgccgaaaaggtgtttgaaaaaggcgtacgaaaagacctttatgacgtcgagcaggattattatcaaaccttcatttctttatttgcggcgaattggacaaaggtcgtgagcaaaaacaaagtgctgtataaaaaattaaaccgggagctgagtgatcttttacaaagggacgggcttaccccggaagcggaagagaaagtcaatcagctgctgaatgaattaaaagaatggcttcattactatgattggctgagcaggttgattgaattttttgagagtgaggaagtctttcggtacgtgccaaaaacaaaagaaagcagctctctaaaataagggagctgctttttgcatcatgaggttaagatcggaaacatgcctttcagccccgcaccaatcatcccgaccgcaaccacggctaagattaatcccatcagtctggtaatcacattcatctcggtttttccgagtttgctgctgataaaagcagaatagtggaaaaagagaaaggtcagggcaataacggcggctatgccgatcgtgacagccgcataatgaccaatgccgctatgaccggcggaaaggctcatcactgttgcaatcgttccgggcccagcaatgatcggaatggataaaggtgtgactgatatatccgctttttccttgctttccttatgttcatcatggtgaagagattgcacgtgtgattctttcgcattcaatagattataggcaatgccgaaaatgaatatgccgcccgccactcggagcgcgtaaatgttgatatcaaacagtttaaagataagatgaccgaaaaccaaaaaagctgcgagaataaaaaaggataaaatagctgccttccgggcaatcgcttttctttccgctgcagtatagccttctgtcagcgtcagaaatatcggtacgtttccgatcggattcgatactgcgaataaaaaatgaagacgtgaacgataaatgagaacatcatatacctccttgttgatagtctctgcacaggaaatagaattattctccacccttttacccggaggcgatttcccggtaaacctttatagcctgtcagaaacgcgccatgctacaatgaagtgacaaattgaataggaaggacgtatacagatgttcaaaaaaattgcggcagatgccttgggcttatctgatatcggaaaaattatcgtacctcaggactatgacaaaacagacgcagacgactatgtcatgcatgaagataatgagaaaatttatttcttgattaaaacaaaagcagacgagtattgctttacgaacctggccctgatccatgtagacggcgaacgcgccacttcctcgaaacgaacgttgaaacgctatccttattcgcaatataaaatctctgacgtttttcttgaaactgccggaaaagtggatttggatgttgaaattaagttcaagctgggcggtgaacaattcgacattgatgtccacaaagaccagattgaaaagttaaaagacctttataaagcactgcttcgcatcgctgaaacaacctatgaaaatgacattttaatcaatcaagcggagcaaagcttagataaagcagtgacgattcttcaccatacccgccctgagcacgtcaatattgaaacgcaatacaaagagctgaccgaattcggattcacttggctgacatccgttcgctcgcagtatcatattaaggattttggggatgtatttgagaaatatattaataactagataaaagaagacacagctgctatcgtgctcgtgtctttttttgtatgaatattgattactttacaacttttttcttttataataaaactattagtctattttccctatattacagataaaggagttattttatgtattgtcctcaatgcggccatcaaacagatggcggaaatttttgtgagaaatgcggatcaccgctccccggtcaatcaggccaccagcatgcagctcaaactggagccgctgcaaagcaagcagcaaaacagttcggttcatttgtcttatccgtcctgaaacgcccttatcaggaatgtaaagcaacaggcggagaacagctgatcagcgcaatcattacgatcgttcttttcagtttgctgacccctttgatgttttatattcttttttcagacggtcccgaaagcgtaagctttacagcaatcttcttagagccaaccatttattttattttatttctatttggcctgcatgcatgcatctttttcgccctgaaaatcgcgggaaaccaagtatctttcaaggattcattctcaagattcggagcgtttctcataccgtttacggctattttgattcttgcccttttcttctttttattacatacagacatttgctttaccatattagccgttggtttaatcggtgcattcttcgccattcctcctgcgatgctgagcagttaccagcattcatataaagggaaggttgatgtcatttactcaacgattgtaatttatctgatcatctgcgttacatttcagcttattatcgaacactatgtcaaagaaattttccgttatatgctcttttaaaaacaatcccatcacctgctggtgatgggattgttttattgaatagacgttaagtaaattcttccgttcttcactacgccggtgtaggtccagttatatgttctgagctttggactgccgcctgattttgtgatatagaattcttcatacgtcttaatcgtgatagccgacccattttggctccagcttttcacttcatagttattaaagtcttctgttgtcccctctttatttaatttcgacacgagatgctgctggtcggaataaagggaactgcctttttcaaggctgtcttccatcagtgagaaattattttgattcacggcatctgcctgactttgcagataactgcccataaataatgtcacttgttcatctgtaacatcgccgcttgcagagctttcactgcctttgtttttcgagccagcccaggcggaagtgtatgtctctggtttatcatttttgattttctttatatttgtgcctgcagattcgaatgttgattctgcatcttcgaaaatccactttttctgttttttatcatatgaaagaagatattcataactcggactgtcgtcagtcatttcagattttgtatagtcgttatacgaagaagactggtgaagttcttttcctgttaccgatacctgccacgttccgtcgtttttctgagagagggcaaatgtgtccaggtcaaaatcagtttccaagtatctatcttttaagtatgaatccgcgcttttcatagaatcgacggtgtccttcgtctccgccttccaattggcacttgcctctgtcatctgggctgtattcccatcagatagagctttggagtattgttttgttgttttgacaattgtgttcataatctgttcctgtgtatcttgatcaggaattaacgttaactccatttctttatcatcgatcggaacgccggcagtttttgtttttccccacggaaattctgcctcgactgaagctgtcattgatccatctgtcagcagcggaccatatgttacggatttgaacggatctttatgaattgacttgccgttaatcagcaaatctcccttcccgctcttgatgtcatccgctaagctgaatgtcacatcgtctgcttccaatgagagatcaacacgaaagctgctatcgccaatcgcctgaatgtcttcctttttcacaaggtcaacgacatcgtttttcagtttggctgagactgtatattcgccgggaatgtacggaccaagggtttgtgcttgatctgctttctttacagatccggcttcctctttattgacatatagatcggtatttttataattgctgctcacttcaaaataaacaggtgctacctttaagtcataatggtcaaataccagcaggcttttcccgtctttttctgcatatacgatatccttctgggctgtttcatcccgcagcgatgcaaaaagttcatcttttttgtctggatgatccttcaaatatgtaagaaacggttttacattatttttagtgagtttaagattgtcatttaccggtgtaagcagagtcgcgatttggtcctgatccccatcatttacggcctgttcaaacttgtctactaacctatcctttgaagtaaaatacgctccggttttatatgcggcgaataatataacgcacgccgcggcaatgctgctccataaaatgatggttttcttagggatcggttttcgcggagcctgccttgtttctgcagtgctagctgtttcttgatttgcctgtttgctaccccctccgatcggggtgccgcattgtttacaaaacttggctccttcattattctgggagccgcaattcttacaaaaaaacatgactttcctcctattctactaatttgataacatttactgcttttcatattttataataaaacagaatgaaattgggaacgaatgaaaaaattaaatgtctatcagactaaaaaggtggtacgaatatgcaaaagctcaggattgaattaggagaagaaacaaatgacgaactatatgatctattgctgctcgccgatccatcgaaagacattgtagatgaatatcttgagaggggagaatgttacacagcttgggccggtgatgagcttgcaggggtttatgtattgctaaaaacaaggccgcaaacagttgaaattgtaaatattgcggtaaaagaatctcttcagaagaaaggctttggcaaacagcttgtacttgacgccatcgaaaaagcgaagaagctgggggcggacacgattgaaatcggaacggggaattcgagcattcatcagctttccctctatcaaaaatgcggattccgcattcaggcgatcgaccacgatttctttctcagacattatgatgaggacatttttgaaaacgggattcaatgccgcgatatggtaaggctttatttggatctctgaaagcataaaaaagccgccgagagaaaatcccggcggtctttttattacttgtttaagttgtagaaagagttgataccgtggtattgagcagtttcagccaactgatcttcgatgcgaagaagctggttgtatttcgcaacacggtccgtacgagacggagcacctgttttgatttgtcctgcgtttgttgccacagcgatgtcagcgattgtgctgtcttcagtttcaccagaacggtgagagataacagctgtgtagcctgcgcgtttcgccatttcgatcgcatcgaatgtttcagtcaatgtaccgatttggtttactttgatcaggatagagttgcctacgccgtttttaataccttcagaaagttttttcgtgtttgtaacgaagaggtcgtcaccaacaagctgaacttttttgccaagacgctcagtaagaagcttgtggccttcccagtcgttttcgtcaagtccgtcttcgatcgagatgattgggtatttagaaacaagctcttcataccagtcaaccatttcagcagatgttttcacaacgccttcgccagacagatggtatttgccgtcttctttgttgtagaactcagaagatgcagcatccatagcaagtttaacttcttcgccaggtttgaagccggctttttcgattgcttcaacgattgtttgaagcgcttcttcgttagaaccaaggtttggagcgaatccgccttcgtcacctacagcagtgtttaagccttttgcgcttaatactgatttcaggctgtggaagatttgagcgcccatgcgaagtgcttcacggaagttaggagcacctacaggcatgatcatgaattcttgaatatccacgttgttatcagcatgctctccgccgtttacgatgttcatcatcggtacaggaagcgtttttgagttgaatcctccaaggtattggtaaagaggaatctgtaagaaatcagcagcagcacgcgcacaagccatagatacgccaaggattgcgttcgcaccaagtttacctttgttttcagtaccgtcaagctcgattaaaagctgatcgattgcgttttgttcagttacatcaaagccaagaagctctggagcaatgatttcgtttacgttgttaacagctgttaacacgccttttccaaggtaacggtctttgtcgccgtcacgaagctcaaccgcttcgtattcacctgtagaagctccgcttggcactaatgcgcggccgaaagctcctgtttctgtatatacttcaacttcaactgttgggttgccgcgggagtctaatacttcgcgtgcataaacatcaacaatgtatggcatgagttttgtctctccttttgattttcaaattatttttgaattaaagatgttcctgtcatttctttcggtttttcaacaccaagaaggtctaataacgttggtgcaaggtcgcctaggattccgccttcacgcagcgtaatgccttctttcgttacaatcacagggactgggtttgttgtatgcgcagtgtgcggttcgcctgattctgtaatcagaatgtcagcattaccgtgatcagcggtaatgatagcgtgtccgcctttagcaaggatcgcgtcaacgacttcgcccaagcattcgtccactgcttcaattgctttaattgttggttcaaccattccggagtggccgaccatatcagggtttgcgaagttaagaatgatcgcgtcatgcttgtcagcttcaatttctttgacaagcgcgtctttcacttcatacgcactcatctcaggcttcaagtcatacgttgcaactttaggcgagttgatgagaatacgctcttcacccgggaattcagcttcacggccgccgctcataaagaacgtgacgtgcggatacttttcagtttctgcaattcgaagctgttttaacccgtgctgagataatacttctccgactgtgttatcaagatttatcggtttaaacgctacatagccgtcaactgtttcactgaagtgagtcaggcagacgaaatacaggttctttggataattctcgccgcggtcgaagtcacggaagtctttgtttgtgaacgtgttggaaatctggatggcgcggtccggtctgaaattatagaaaatcacagaatcgccgtcttggattttcgcaacaggctcaccgttttcttttgtgatgacagatggaatcacgaattcatcgtagataccatttgcatatgaatcatcaacaacatccagggcgctgcggtaagatgggccttcgccgtacgccattgcgcggtacgctttttctacacggtcccagcgtttgtcgcggtccatagagtagtaacgtccggaaatgctggcgatttcacctacaccgatttccttgatttgatcgttcaactggttgatgtacgttttcgctgtctgcggacctacatcacggccgtcaaggaagccatggatataaacctctgtcagcccttcttttttcgcaagctttaacagtgcgaataaatgattgatatggctgtgcacgcctccgtcagataaaagaccgaacaggtgcaaggctttgttgttttctttcgcgttgctgatcgcgtcaaggaatgtttgattgcgttcgaactctccttcgcgaatggcaacatttacgcgtgttaagctttggtacacaatacgtcccgcaccgatatttaagtgacctacttcggagttccccatttgcccttcaggaagacctacagcctcgcctgaagcagtcaatgtttgatgaggatactggttccaatagcggtcaaaattcggttttttcgctaaagcgactgcgttccctactgtttcgttacgtaatccgaacccatcaagaatgatgagtgcagctggttttttactcatattgaccttcctccaataattgaacgaatgactgtggctcaaggctcgcgccgccgaccaaagcaccgtcaatatcggactctgccatatattctttaatgtttgcaggctttacgcttccgccatattggatgcgaagcttgtctgcagcttcttggctgaagctttcagcgacggttttacggatatgcgcacacacgtcattcgcatctttcgctgtagaagatttgcctgttccgattgcccagattggctcatacgcaataacagaagcagcaacttgttcttcagaaagaccagcaaggccttttttcacttggtcagcaacaagatcatttgttttgccggcttcacgctcttcaagcgtttcacctacacagatgatcggcacaatgccgtgtttgaaagctgcgtgtgcttttttgttaactgtttcatcagtttcagcgaacatttcacggcgctcagagtggccgatgacgcagtagtcaacgccaaggtctttcagagcaaccgggctgatttcgcctgtgaacgcgccgctttcttcgaagtgcatgttttgagcgccgacttttaggtcagtgcctttcacagcagaagcaagcttttctaagaaaagcgctggcgcgcaaacaacagcttcagctttgtctgctgctggaatggaagatttcacttcttcaacgaagctgacagcttcgccgagtgttttgttcattttccagttaccggcgataattggttttctcatctgttccacttccttatagcagttttgagattatttatcgttcagtgcagctacccctggaagctctttgccttccataaactcaagggatgcgccgccgcctgttgagatgtggctcattttgtcagcaaggccgaatttttcaaccgctgccgcagagtctcctccgccgatgacagagtatgtatctttcgcctctgccaatgcttccgcaaccgcttttgttccttgagcgaacaagtcgatttcgaatacgcccattggtccgttccacacgacaagtttgctgtttttgatgacgtcagcatacgtttcgcgtgttttcgtaccaatgtcgattgcttctaaatcactagggatttcagagatcggcacaattttcacgtttgcatcgttagagaaatcatctgcaacgagtacatcttcaggcatgtagaagttaacgcctttttctttagcgcggtccataaatgatttcgcaagctcgattttatcctcttcaagaagagatttaccgacttcatagccaagcgcttttacgaaagtataagcaagacctccgccgatgatcaggttgtctactttatcaagaagactctcgattacaccgattttgtcttttactttcgctccgccgatgatcgctgtgaacgggcggtcaggattggaaaccgcttttccaagtacatcaagctctttttccattaagaaacctgcaactgctggcagatgctcggcaattccagctgtagatgcgtgagcacggtgggcagcaccgaatgcgtcatttacatatacatctgcaagctcagcaaatgcttttgcaagctcagggtcatttttctcttcaccaggatagaaacgtacgttttccaatacaagaacgtctccgtccttcatctcagaaatttgtgcttttacagcatcgccgtatgcttcatccgcttttttcacttctttgccaagcagttcgccgagacgtgcagcgacaggagttaaacgaagctcctcaaccacttcgcctttcgggcggcctaagtggctcgcaagaaggactttggcgccttggtctgcaaggtgtttgattgttggaagcgcagcacggatacgtgtatcgtctgttacttccccgtctttcattggaacgttaaagtcaacgcggcagaatacaactttgccttttacgtcgatgtctttgagagtttttttattcatgcctaggagatcctccttcaaaatggtttgcatacagcacgaaaaacgtgaaaccgtctgttcaagcgataacgccgctagggcagatcgcagtctttttcggcacagggcagttcgtctaaaagccagggcagcggccttaggcgaaagcgccggcaaagctgcttaaaacgcggtcgtttctctatcacagagcgttttctgaaagccggtcttcatggaaaaagggaaagggagtccgtccccttcccttgtccgctttcattatagcgcttctattcgaaagaaccaagtcaggtcctttttcagctataaattaaagacctttttttgcgatgtaagctgcaaggtcaacaacgcggttagagtagccgctttcgttatcgtaccaagagattacttttaccatgctgccttccataaccattgtagaaagagcatcgattgtagaagagtttttgtttccgttgtagtcgccagaaactaatggctcttcgctgtagccaaggattcctttaaggtcgccttcagccgcttctttaagagctgcgtttacttcttcagctgttacttcttggttcagttcagcaaccaagtcaactagagaaacgtttggagttggaacacgcattgctccaccgttcagtttgccttttagttcaggaagaactagagaaactgctttagcagcaccagttgatgttgggatgatgttttcagctgctgcacgcgcacgacggtagtctttgtgcggaagatcaaggatttgctgatcgtttgtgtaagagtgaacagttgtcatcataccgcgtttgatgccgaatttatcgttaagtacttttgcaaacggcgcaaggcagtttgttgtgcaagatgcgttagagataacatcgtggttagccgcatcgtatttatcttcgttaacacccataacgattgtgatatcttcttcgttagcaggagcagagatgattacttttttcgcgccagcttctaagtgtttcgcagcgtctgcgcgttttgtgaagaaaccagtagattcaactacgatttcaacgccttgtttgccccagctaagtttagcaggatcgcgttctgcagaaacttcaattgttttgccgttaacaacaaggttgttaccgtcaactgaaacttcagcgtctaattttccgtgtacagaatcatattgtaaaaggtgagccagcatgttagcatctgttaaatcgttaaccgctactacctcaacttcaggattgtttaatgctgcgcggaatacgttacgtccaatacgaccaaaaccgttaataccgacttttactgccatgattgtttcctcctttaaataagtgagagatatttatattgagggattattcatcccttaataacttctttgcggctccttcgtctgtgacgagaaccgtgttgcgtggctttttaaagtaagcctcgatcgcctcggcttttgatgatccgcccgctaccgcaataatatcggggatggcgtctatgtcatccagctgcattccgacagaatgcactttgtgaaccacttcgccgtccgcgttaaaatagtagccgaacgcttccgtcaccgcgtcgttatcatctattttctttaagtcttctaaaggcgtgtttctgcgctgagccatagttttagcttcgccgattccatgaaccagcatactcgctgatttaatggtgttcagcacctctttgacagaaggctcttcaataatagatgaataggcgccttgtgacagctgtcccggaacaaacaaaagccggtaagtgcctgaagccttctccgccatatgcgcgcatatggtgttcgcctggtttttcacgtcttcgcctaaaccgcctcttgcaggcacaaacaaaagctcgcggtttttagaatccggcgtcatcatttcggcgacagcttcaattgtcgtaccgccagttacagcgacgatatttttgcctgaaaatctttttttcatacatgcgacagccgctcttcccatttcttttttgacccatggggattgatcgctgtctccggatacgataatggcatcctttagatttaaacgttcttttaatgtcttttccaaaagagtcaaacctaaaacatctttcatcgtatcttccaaaacagaaagcagttcatagccctcttctgtcaatgtcatgccgtttgtcttaatatcgaccaggttctgttcctttaaaaactgaacctcgcccctcagcacacgctcgctgatttcgagactggcagacaggcttcttcgcccgatgggttctgtcagcctgatatactgcaagatttcaaacctcttttgcataacgagcagaagatcaggcaataattttttttgagcttgtattaactggttcatgactcaaacgttccttccttttttgctggacgttatatgtcccgctatgacaaaaaacgtcccgtcatagccaaaaaaaatcatttctgctttctttaattattttaacagggtggaattgtttattcaactgttaagagccaattcatcgacaatattcgcagagttttcatgccgcgtcgttttatccagcaatattttatcctatatatctttatcttatacagaaagcgccaaatggtgcatcccaatataaacagcccttcccgtagaaagggctgtttcattaaagcgttttcattttatccaaagcttttcaatttcctcgagcgatttgttcttcgtttccggacagatcgtaacgacaaacaggaaacaaaggatgttaatcaccgcaaagatccaaaatgtataggcgagcccgaaagaatcgatcatcattggcacaaactgtccaatcgcccagtttgctccccataaaaagatggtcgcaatgcccgcggcccgcgcacgcagatggttcggaaagatttcagaaatcataatccatgtgatcggtccgaccgagacacagaaagcagcgacaaaacctaatataaggacgatcatcatgatcccgcttgttaactcaaagtaaaacgacgtcccgattaaaatcataaaaatagccataaaagcagaaccgatggacatcagtttttttcgtccgactttatcaatcagcaacaccgcaataacggtaaagatgacttctacaacaccgacgatacaagttgtcacaaatccggcgttttgcccgaatcccatcattttaaagatttccggcccgtagtaagtaatcgcgttcatgccgatgacttggttaaagagcgccagcaggattccaatgacaagcgcctttctgagccccggcttaaacagctgggagagcgaccccatttgttctatttttaaagagttctcaatgttctttaattcttcttttgcaacagtttctccattaatacgtgtcaggatctttaaagcttcatttgttttgcccgctttcgccagccatctcggactttccgggacgacgagcaggacaaggaaaaagatgacggacggcaccattccataagcaagcatccatctccagccggtgtgcacgccccattcgtatgttccggaccgctgcacagctagattaataaagtatgtagcggaaatacccagtatcgtaaagagctgatataaggaagataaacttccgcgtatggcgggcggtgccgcttctgtaatatacgtaacagagagcgatgagcccatcccgattcccagccccccgataatccttgcaatgattaaggtggacacgtcttgagaaagcgctgaaacgattgctgatatcgcaaataacaaagcggctgtcattaaaatttttctccggccgaatctgtcacttaaaaagccggatatcccgacgcccacaactcctccaatcataatgcttgaaatgacaagtccctccataaacggactcaggctgtataaatctttcagaaaaccgatggcgccagaaatcactgccgtgtcatagccatacaataagccgccaagccccgccgcacatgagatcaaaatgacaaatcccattgaatggcttcgtgttacaggaacatttggttctaattgagttggagtattcttcatttccctgccctcccgaatgttgagtaaagcgttttcatttaaaccttaaattgtacgtacttatattaaaatttaacgaaaattacatttaattagtacgtacaaatatagaataatcttgtttgcattttctgtcaatgttttcttacaaagaacgctgtgatatactgaaatttgtccgtatacattttggaggaatggatatgttaccaaaatacgcgcaagtaaaagaagaaatcagttcttggattaatcaaggcaaaatactgcccgatcaaaaaatccctaccgaaaacgaattaatgcagcaattcggcgtcagccggcataccatccgcaaagcgatcggagacctcgtatcactaggtctgctgtacagcgtgcaaggcggaggcacctttgtcgcttcacgctctgctaagtcagcgctgcattccaataaaacgatcggtgttttgacaacttacatatcagactatattttcccgagcatcatcagaggaatcgagtcctatttaagcgagcaggggtattctatgcttttgacaagcacaaacaacaacccggacaatgaaagaagaggcttagaaaacctgctgtcccagcatattgacggactcatcgtagaaccgacaaaaagcgcccttcaaaccccaaacatcggctattatctgaacttggagaaaaacggcattccttttgcgatgattaacgcgtcatatgccgagcttgccgcgccaagttttaccttggatgatgtgaaaggcgggatgatggcggcggagcatttgctttctctcggccacacgcatatgatgggtatttttaaagctgatgacacacaaggcgtgaaacggatgaacggatttatacaggcgcaccgggagcgtgagttgtttccttctccggatatgatcgtgacatttacaacggaagaaaaagaatcaaaacttctggagaaagtaaaagccacactggagaaaaacagcaagcacatgccgacagccattctttgttataacgatgaaattgcgctgaaggtgattgatatgctgagggagatggatcttaaagtgccggaggatatgtctattgtcgggtacgatgattcacatttcgcccaaatctcagaagtgaaactaacctctgtcaaacatccgaaatcagtgcttggaaaagcagccgccaaatatgtcattgactgcttagagcataaaaagccgaagcaagaggatgtcatatttgagcctgagttgatcattcgccagtccgcacgaaaactgaatgaataaaaaaagcaatgtatgggtctccccgctacattgcttttttttatagctgttatctgttgttccaaacgtcagcgatgatttcaaacgaacgcattctgtctgcgtgttcaaaggtttctgagttaaccataatttcgtcagcctgtgtcgttttgacgaaatcttcaagcttcgccttcacttcttccggacctccgacaatcgtggagctcagctgctcattgaccatcgctttttcatacgggctccagatttgatccatatcctcaacaggcggtttaagctggttcggcgtaccgcggacaagatcaagaaacctttgataatgcgaagtcgcaaggtgctgcgctttctcgtttgtatctgccgcgataatggtgacaccgaccatcgcatacggttcgtcgagcacgtctgacggcgtgaaggaattgcggtaaagctccaatgcaggaaccgtattcgctggtgaaaaatgagcggcaaaggcaaacggaagacctagttcacctgccagacgggcgctgaagccgcttgagcccagcagccaaatcggcacatctatgccctctccgggaatggcgcgaacttgattgcgcacatttcctgacggtttaaaataattgcgcagttcctctaattgttctggaaaatcctccccgctgttgatgtttctgcggagcgctctggctgtcaattggtctgttcccggcgcacgtccaagccccagatcaatccgcccgggatacagtgtttccagtgtgccgaattgttcagcaatgactaatgaagagtggttcgggagcataatgccgccggaaccgacgcggattttcttcgtgcctccggcaatatggccaatcaaaactgcagtggcggagcttgcaacaccttctatattatgatgttcagcaagccagtaacggtgatagccccattcctctgcccggcgcgccaagtccatgctgtttcggaatgattctgcaatcgttcctccctgaacaaccggagataaattcaagacagaaagcaaggtatctttgcgttggttgttagacatattgttctcctttgcaaatgtgttatcagtaaacagcccaaagctgtcaggtcatgattgaaagaacttctatcacaccataacacaactgcattcaggaataaaagaattttattcgatgaaattcgaacaatgtaaaacgaacggtttggcccgctattctgctccaaacagctccttagccatctcaataaagagcttagccgccagagaagcctcctttagcgacggaacagcaagctgcacatcacggtatacctgcgggtccaattcccgggtcaccacatgctccggaagcggcatccccgacatggacatttctgataaaatcgcgagacccaggccttctctgatcatactgatcgaggtgttgatgttatagaccgtgaaagctgggtgcagcgtagcgcccgcctgcctgaacatatcgacaaatggtgattcatagcctccgtcacagacgatcatcggttcatggtcaagatctttcagcgtaatggccgaatgactggcaagcgggtgatcgtccctgagcacgacagccattttgtcttttttcaaatgaatgtactccatctcctctgttggatacagaagaatcccaacatctatcatccgcgtatgaagccactccttgacttcatttacagttccctcgtgcagcacgagctcaagttttggatatttttgtttaaattcactgatcagcttcggcataaaataagccgaggcagttgagaatgtgccgatatggatcgttcccagttcaagccctttttccgctgctgctacctgctcaactttttcaatgccttttaagacttctctaatgtatactaagatctgttttcccgtatccgtcagcatcaggccattgcggcggtcacgaatgatcagctttacatcaagctcagcttcgatcgcagaaatcgcatggctgacagccggctgtgtcatgttcagcgcctgacccgcttttgtaaagcttcccgtttcagctattttcacaaaaacctttaattgtgtaatggtcataacaatttacttatgctccttataaaaaagattcattttatttatcttatgttctaccgtatcatatgatggaaaagttctacaaggagtgaatgaacaatgaagcagctctcaaaaacgcggacagctctcctgctcgcatttctcgtcatcatgtggggcgtcaattggccgctgtccaaagccgcgctcgcctattctccgccattattgttcgcgggcatccgaacgctgatcggcgggcttttattagtcattgtcgcactgccgcgtattcataaattacgcttaaaagaaacgtggccgatttatcttgtttctgctcttttaaatattacgttattctacggcctgcaaacgatcgggctgaattatcttccggccggcctgttttctgcaatcgtcttcttccagcctgttctgatgggtgtattttcttggctgtggctcggcgaatccatgtttgtaatgaaagtgattggcctcatcctcggttttgcgggagtagccgtcattagtgctgcgggctttggcgggcatatttctgtcattggggttctgctggctctcggctccgcaatcagctgggcgctcggaacggtatatatgaaaaaaacaggcagccgcgtcgattccatctggatggtcgctctgcagctgacgatcggaagcgtgtttctgctaatatccggcttttggacagaaagcttttcggcgatccaatggacagctccgttcattacgagcctgctgtttatctccgtattcgttatcgcactcggctggcttgtcttttttacgcttgtcggttcaggagaagcaagcaaggtcgcatcttatacttttttgattccgctcatatcaatcgtggccagctccattttcctgcatgaaccgctcacccttagcctcttggcagggctgctgctgattgtcacgagcatctgtctcgtgaatacaaaatcaaaagcgcagaaagctgcggcgattggtataaacgagaaagctgcacaataataaaaaccctcttgccggatgcggcaagagggtttcttatttactgatgcttgcgtcctttgaccaaatatgcaactgtaatcaaaaggtagatcgccgcagtaatgccggtaatgacaattgatgttgtcatgatgaccccgatcagaatggcgagtaatgccacaatcgcaaaccatgtcgtgtacgggaaccattttacataataggccggtgtttccgtttgctgttttctcgattttaaatgagcgaatccgatgatcagccaaatgaataaaacggtatatcccaatgatcccattaaataattaaatgtttggcttcctgcgaacagagaaatcaatacgccaatatagagagaagaagtgcacatcagaatcgcaaacatcggtacgtttttcgatgaaagcttcgagaagacctttggaagccttccgtcacttgcctgtgtatacaaaatgcgtgatgatccgtataaacctgaattcatagaagaaatgatcgccagcaggatgactgcattcatgatatgatccgcgcccggaatgcctaccattttaaagaccatcacgaaaggactttccggaaccgaattgacttggttccatggaatcaggctgacgatgatgaaaaacggcagcaggtaaaacgcgacaatccgtgtcagtgtgctgcggacagctttcgggacaaccttttccggattttttgtctctgcaagcgttacaccgataatttctgtaccgccgtaagagtagatgacgacaagcatcgccgtgatcagccctgtgccgccgtgcgggaaaaatccgccgtggtctgtcaggttggaaaatccggatgctgtatgatcaccgaatgatacaaataagagcagcaatcccagaataataaagataataataacggtaatcttgatcattgccagccaatattcggtttcggcgaagattttaacagaaagcaagtttacaatcgtgacgataagagaaattcctaatgccaacacccagatcgggcagcccggcagccaatattgaatgaaaattgcagctacaacagcttcagccgcaatgttgagcacccacattttccagtagatccagtccaaaagtaagcggcgtaatttcccaatacctgttggacaagatcacggaaggttctggcgttacggtttcgaacagccatttccgccagcccctgcataataaacagcaaaataatcccgccgagcagatatgcgagaatgacagatggccctgccacatcgatcgctgagctgctccccttaaataaacctgcgccgattgctccgcccagcgccatcatcataatatggcgggacgtcatcgtgcgttttaacgtttgattgtcgtttttcatcctcttctacctctccttctcgttttcaaaaacaaaaaagcccgccgtctcctacctaatctaatagataaagagacgacgagccttcggctgaccgcggtaccactcttgttgattcttcatgaagaatcctgcttttgacctgtaacgaaggttagccgttaaaacatagggaatattcaatctattccgttccgtcttaccactcccgggcgagttcaaagaagaatcaggctgcgtcgcaccaccccgcagctctctgttctgatcactttcttttactgctcccaatctatgtgttttagttttctgaaaaactcaaattttatgatctgaatatattaacataatatacgtgcttctcttttaactgtcaataacttcagagaaaaaagaaactgttattttgtcccttttcgaatggctttccaaaaggattctgactcgtttcctaatgcgtaaactgaaacacctgctattttatattgctttgccagatggcttttcgtttgaacggttttttcgttttcataccacacgacatgtttatgcttctttttgtcaacataagaaaacgtcatcgagcctgattttttgttgaatgccggctttgctttttgttttttgatgagggatttgagctcattccattcccttattgtgctggtacttccgtcttttacatcccagtcatagccgtacgcagggattcccatgatgactttattggctttgatctttttgactgaaaactgcagagagcttttgatccagtttgtgcttgccactgaccccggctcaccccaaatgccgtgttcatcgtaggtcatgacttgtacgaagtcggcatatttgccgattttcgcataatcatacggccagctccagtcatcatttttatcatcggcgcttttggccggaacggataccattgttttaatatgtttcttattcaaagcctgtgagacatattgaatgaagttcgagtatgcagcgcggtcttctggatttactgcttcaaaatcgatattgattccgtaatatgagtgctttttggccagtgtaattaattgatctgtgaatcgttttttcgctgttttattgctcatgacccgactcgctaaatctccgtcaaaatcataaatggcatcattatagtttgaaatgacagcccatgtcttgatttttttctttttcgcatatgtcagctgcttagttggggcatcgccaatgatttgtccgtttttttcaaacgcaaatgtatcggttgcgatggcattcatgtatgtatgatatttcgtaagagaattgtatgaagccgtatccccagtcgtgtagcctactgtcataccggctgccttcgcttctccttttgtatacataaacagaacaatcgcaatcgccagtgaaaccgctatgatcagccattttttcattgcatttcctcctgtatcaagtcatactcttctcatcggccaaaaaattggaagttgaagttttttcaagcaaaaagcccggcatatgcctgccgggcttcctgagttcagcggtcagagacgagaatatatgctgcctttactggtccatgcacccccacaactaaatccatttcaatgtcggctgagttactcggtccggtaatgtagttgatacatgaaggaacagtgacaccgttcgcaatgttttggcggatgatatcactggcttgtgtcattctcggtacaatgcttgatttcggcacgatcgcaatataagtcgttggcaaaaggctgacagagcggccgatgtcttttgaggagaagaggacaaccgtccccgactcagccaatgtaatttcgctgaatgtaatccctacattggcttgctccgcttttttaatattttcctcgcctttgtcagcatcccactcccagaccggcgttccttcactcggccagtccttggtgagcaggcttttcagtccgtattcttcaaagcgggggtccttcggaatgatgacagggcctccagaaaagcggctgacttgctcgcgcagggcatcgtaaaggccggttgaatccgtttcaatcagctctgtatggattttgacgcaatggtttttgagcactgtgactaagtcatccgctgaataaccttcaagtgttttatattgcggctcatacgcccattcagggactgccacgcctcctgttcttctttcacggcccaggctggatgcgattcgatttaaaaagctctcttgattctgaatggttcccttcgtcatcactgctcctccttcgtgcgttcacttgtttctctgtccgcaaaccagtctctgaatctcgatttatgcggtgccgggaagtcacggatctgggtccaatttttaagcgggccgggccctttcgaaattttttcgtcctctgtaaaaggcgtcatggcggccggcgcccattttgagcccattttgtaaagcgataaagaggatgcgccaagtccgaatgctttcattgcaagcttttcactgatcggcgctctgccttctttttcgacgatattctgacgatgcttgagtagcagctcatgaagcgggattttgaccgggcaggcttctgaacaagcagcgcacagtgaagacgcgtacggcagctccttataatcgtcataaccgccgagcaacggcgataaaaccgctccgatcggtcccgagtagattgagccgtatgaatgtccgccgacatggcggtacacaggacagacattgatacaggcggcacagcggatacattgcagcacagactggaattccgttccaaggatattggatcgtccattgtcaacgatgacaagatggaattcttccggaccgtccacttcaccttccagcttcggacccgtcaaagctgtaatataacttgtcagccgctgtccgacagcacttcttgtcagcatgctgacaagcacttcaaattcagaaaatgacgggacaatccgctccattcccatgacggtaatttgtgttgtcggcaaggtgctcacaagccgtccatttccttcattggtcacaaggctgacagaacccgtgtcagcgatggcgaagttacagccggtaatgccgatatccgcttccagaaactttttccggagaatggcgcgcgcatgcatcaccagctcttccggtttttctgtatgttgatagtccagcctttctttaaacacatcgcgtatctgctctttatttttatgaagggcgggcgctacgatatgtgacggcggatcgtgatcatcgatctgcaaaatatactcgccgagatcggtttctacgacttcacagccttccttctccagcacctcattcagattgatttcctctgtgaccattgatttagatttcacaattttcttcccgttcttcttttgaatgacatcacgaatataagaagacgcctcttccgctgtttccgcgaaatagacatgtccgcctcttttcgccacattttcggcaagctgtccgagatagaaatcaaggttttcaaggacatgctgcctgatttcctctgataatgagcgccactcctcccagtttcccagttcttctgctgcctctaggcgccgcgtccgcagacgctcctgtgcacctgaaacagcgcctctcataaattcattatcaatcccctgtgatacccgctctttaaaagcgtcagtaccgattttcatcgccatgatcctttccccctctgaatccagttttatctgctgttgagcacttcggcgatgtgcatcactttgacattcttatcttttcggccaagccgtcccccgatattcatcaaacagccgcagtcagcaccgatcagcacctctgctcccgtttcctccacacattcgactttttcatcgaccatctgctcagaaatctgcgccatcttgacggagaacgttcctccgaatccgcagcagttatgtttgcccggaagctctgtaaactgcaggcccttcacatggctcaacagcttcatcggctcctcccgaacacccagcagcctagtcatatggcacgacgtatgtaaggtcgcttttgtatgaagggtcgcgccgacatcctctactccaaggacgttcacaataaaatctgtcagttcatacgttttatccgccagctttttcgctttatcggcccatttcggatcatcctgaaacaggtgcggatactcccggaacatcgttgtacaggaaccggaaggactgacaacatattcggaatcctgaaacgtttcgatcatccgtttcattgcttttttggcgtcatgtacatagccgctgttgtatgccggctgcccgcagcaaatctgcccttccggaaaatcaacctcgcacccaagccgctccagcagctcaaccgttgcttttccgacatttgtttgaaacatatcaacaagacaagtgacaaaaagtgagactttcatgatgaacccctctctcatccccaatatatgatcaggtcatctgatgacctgagttaaaataactatatgaatatcgtacactattctgacaatggaaggaaagagttttctagggatattttcatttgtggcatatcaaaaacactcccgatctcccaggagtgcagtatatggttaaatccagcccttttcctcagcgatgctggcggcttctgtccgatttttcgcattaagcttttggatgatttctgagatatagtttcgaactgtgccttgagataaatagagctcaagcgtaatgtcttttgttgtcttgcctaaagccgcaagcctcagaatttcttgctctctaacggttagcggattttcgtctcgcatcatattaaacgtcagctcagggctgaagacacgttttccctttacacattttcgaatggcatcggccagatcgtcaatttcgccgtctttcagcagatacccatgtgcaccggcctttacggcgcgttcaaaatatccggggcgggcaaaggtggttaaaataatgaccttgctgacgcagccttttttcattaattcctctgccacatccagcccgcttcgaaccggcatttcaatgtccataatgcatacatccggctccagcttcaaaatagcatgtagcgcctcttccccgttcaatgcttgtccgatgactgtcatatcctcttctaaatcaagcaaggatcccaaagcgcctaaaagcatgcgctggtcctcagcaataaacagacgaatcattcttttcgtcctccaatcattctgcttttttaataagcggaatcgtcagtgccacaaccgttccgttatgatctgaaaccgttaatcccccttcaatgagcatgagccgttcttccattccccacaggccattcccaaacattttctccttcggcgctccctttccgtcatcccgtattacgatcctcattttgtcagcaaattgagaaatggtgatggcacagtgggttgctttgctgtgcttgataatgttagtcacggcttcccgcatacacatactgataatattttgagtgacgggagatatcactgaaaagtcgtcggctccttcgtattgaaaggtaatgttccccgctcttaatatgtgctgaatgtttacgagctcctctgttatcgtgaccgttctcatatcagaaaccagctctcgaacttgcttgagtgcggagcgtgaactggtttccatttcttttgcctcaagcttggtccgttctggatcagatgcagacagccgctgaatgagctggctttttaatgtaagcagcgacagggtgtggccaagagtatcgtgaagatcacgggcgattcgaacacgttcctcccttttagagagttcttttatctgttcgttggcttgtgcaagcttagcttcaagctcaatcctccgaaacatagaacgaattccgaatggagaaatgagcataatgacgagaaacgggagaacagaaaaaagctcccgaagcgagaccgaattcgcgataaattggtataggcatggaaaaagcagtataaagattaaagcgcagaacgcacggttaaaattcgttttctctttgtaataaccaacaaagtttgccggaaaaaaacctaagtatatataggtgatattgtaaaacacactatacatcaaaataaccgccatttgcacgataagccaatatgtaaacgaagctttgcccacgctgcagaataactggcgatatgccgctacaaaaaggagcagcataccatatccgatcccctgtttgacccctgattcttttaataaagagaggaacggcataatcgtatacaccagaaagatataagggaaaaacccgaattccttcgggaaaatagatattgcctttttcatgtattacaccgcttcttgttttcttcttatatatttagatagtagcatgaagagcatcatataagcgattaatatcagaatatttttccaagtcggactcccaccccggacaagttcccacgctccgctcccgaaatgataagacggaagccactggccaatgctctgcatcatgtcaggcatgacctcaaacggcatccacatccctccgcctaaagccagcagcatataaagcacattactgattccggccgctgtttctacttttctcatgaggccgattagtgtgcctaatgctaaaaaaggcaatgcgccaaacaaaatccacagtccgctcatcatccattcaaacggtgacaaggcaatatcattgatgattgcgccgaacagaaatatgacggtaattgataaaacgtgaatgacactttggccgatcatctgagctgataaatagatatgatccggaagaggcgtaaggcggataaaggcggtccagccttgtgaccgctcttgtaccattcggatgccaagcgtcatgatagaggaacccatcacgctgaagactgtcatcgacatcaggtaatgggcttcccatgcacgttgatcagggacgttggtattcactacatttgtaaagaaataataaaaggcaatcggcatgatcagagaccaaagcacaaagtacttgttcctaagcacccttttcatttcagcgatgctttgcttttgcagcacgttcactcacatcgcctccctgttgccgtcagccagctggcgaaatgcctcatcgagcgttgcttgctcaattcgaatatcccgtgcatgtatgttttcttgaaagatcagcgccaacactttgtctgtatttgatgtctggatgatggttctctcatgctcgtggatcactctctcgacttccgggtgacaagacagcctttccaatgattcacttgaatgaagcgtaaaggaaacagactgtttttgaattcttgagcggatttgcattggtgagccgtctgcaacaagctgtccttcagtaaaaaataggattcgctgtgcggcatcatctgcttcctgtaaataatgagttgaaaaaataatcgtttttccttggtccgacagtccgtgaatggtctgccagaatcggtgtcttgatgaagtgtccatgccgactgtcggttcatcaagtataagcagctccgggttcccggcaagagccaaagcaaagctcaaacggcgtttttgtccgccggataatttttctgctcttgttttcaaatcttctttggtgagtgctgttaacgaaacgagttctttcatggacaatggattcggataatagctccggaagagttcaaggatttcatccaccttaaggcccggcatgacacttacttcctgaagcattacacctattttttcacgaacctgttgatcatcgggaacccggttaaatagtttgatttctccctcactcggtttcagcaatcctaatatcatcgagacgacggtcgtcttccctgccccatttggcccgagaatggctgcaatttctcctttttcaatactgaagctgatgtggtttacagcggtttttcgctggaaatgttttgtcacgttgcttactgttactgcttctttcatcacatgagcacctcctgatcgtttacattgattgtaaaatgacggagaagacgatgttagtatggggtgtcatgatgatggagtgacaaatgtcatttttttctcaccccggtgtctaggcaatcctcctcctgcatcttccaattcatccatcttttctatctcccatgtcctctttcttttaaactgctgtgacattcatagaaagatacactcttcaaaccatccgagtgttatgatagaaatattgaactttatattactttccggctgaaaggagccaatcatgaacgaagcgattttgtctagaaatcatgtgaaggtgaaaggcagcggcaaagcatctatcatgttcgcacctggttttggatgcgatcaaagtgtgtggaatgccgtggcacctgcctttgaagaagatcatcgggtgattttgtttgattacgtcggttcgggacattcagatttgcgcgcatatgacctgaatcgttaccagacacttgacggctatgcccaggatgttcttgatgtttgtgaagctttagatctgaaggaaaccgtgtttgtgggtcactccgtcggggccttgattgggatgattgcatccatccgccgcccggagcttttttccaatctggtgatggtggggccttctccttgctatttgaatgatccgcctgagtattacggaggatttgaagaggagcagctccttggcttgctggagatgatggagaaaaattatatcggctgggcaactgtatttgcggcaaccgttctgaatcagccagatcggcctgaaattaaggaagagcttgaaagccgtttttgttctactgatcctgtcattgcccgccaattcgcgaaagcggcgtttttttctgatcaccgagaggatctttcgaaggtaacggttccctctcttattctccaatgtgcagatgatatcatcgcacctgcaacagtaggtaagtatatgcatcagcatctgccttatagcagtctgaaacaaatggaggctcgcggacattgccctcatatgagccatccagatgagacgatacagctgatcggcgattatttaaaagcacacgtgtgatataggaacgaaagggatagaggtgaccctcttagatggacaaacaattgaatgatgcaccatgcggtttcctcgctttgtcagaagaggggtcgatcatagctgccaaccgcacccttatcaagattctggattatgagccggagcaggttatcggccagcatatgaatatgatgttgacaattcccgcacagcttttctgccagctttatttttttccgcttttgaaattggagcatcacatcgaagaaatatacatttccctgaaagctagagatggagaagaaattcccgtccttatcaatgctattgcgagacacgatagcggggcttctgtctttgattgtgttctgattccaatgcgaaagcgaaatgaatatgaaaatgagctgctgatagccagaaatgaggctcaggaagctttgcttgccaaacagaaagccaatgcggagttagagattgccttggaaacgctgaaagcaaaacaagaagaacttcttgagatcaataaacaaaatcaacaatttaaattaaacaccaaaagagagcttgaactcgccagaaagatccagaaaaactcgttgactgaaccgattgtaaacgatcaggttcagattgactcttattacaacgcatcgagtgaattgtcaggtgatctttacggatattatcaaatcgatgaacaccgttacggcattattatccttgatgtgatggggcacggaatttcatctgcattgattacgatgtctcttcatcctttgttccagcgccagatcacgcaaggtctcagccccgttaaagttatgaaggaattggaccggcaccttcacagcttgtttcaaaatgatgaggaagcaagacattattgcactgctatttatctcgagattgacatagcacggcaaagaattgattatgtcaacgcaggacatccgccggcactttggcaggacgatagcggaactcaacatctgcttcacgcgacttcgcctccgatcggaatgtttgaagacttagtatttcagtcaagcagcctttcatacacggagggcggaagattgcttctgtatacggatggcgtgatggatcctacggcttcatgttatttatatgatttactaaaggatcatcctgattcgccgatcgctgaccagaaggagaaaatccttacatcactgcagcatcaaaaggaagctcatcataagagtgatgacgaatgttttatattagttgatgtaaaataaaatgatccatgagacataacaatgatttgttacatctcatggattttttgtttcagcgtttctttggaatatgtcctgactccgcatattgaaacacctgcaaggaaggcagcgggtgtccattaaaatcaaataaagcttgattatctacagcacttcccccataccacttcccggcgtcttcagggtcgtattcagcagcatagctggacgcccaccctgacccgtatgtttcccataacactttgtttttctctatctgtgttttcggtccgaccggaatccacgcaggctcccagtagaaaacaccaagtcctgctttgcccgtattcgccactgcctccattacatctcttactgcagttgcctggccttgaacagaaattggatatggcagcgtctgcccgctttttggtgctgtatttccatgcccatcgccatcctcggcggtataggtgtacgatgtctccgccaccatgacttttttgccgtacgtgttggcaacagccttcagcacggaggtcaaattttgtaatgtgccatgccagaaaggataataggagctcgcaaacacatcataatccactttgtttttgctgagtgtttccgcaataaatgaataccttccagccgtttcaggattggtaaaatgcagggcgaccaaaatatttgaatttgtctccctgaccgctcggcttccttcattaaataattggcacatcttcgtccaatcagtctcaccggcaaatcctcctgttgtttcatttccgacctgaaccatgccgatgtcaacgccttccttgatcatcttttgcaggctttgtttcgtatactcatagagctttgctttttttgcttcaaagctgagattcacccaggctttgggcaccttttgtttcgctggatcggcccagaaatcagagtagtgaaagtcggccagcaccttcattccgttcgctgtcgctctttttccgatttcgatggctttttgaacatcattgtttcccccgccatacccgttgccatttgaatcatacgggttattccagatgcggacgcgaacatagttgaccccagcctgttttaaggttgtaaagatgtcctgacgttttccgcttgtattataaaaggtgacaccgctgttttccaaagcaataacgctggacacatctgcccctttgataaaatccttgttcatcccctctacttttttaacaaaaagatcctctgtccgaagctctgacacgtgcttgtccttctcaatggcagcggcatatcctgttgaactacatgcactccacacgatggcagccgcaaagaacattttcactttgcttttcatgatttcatccccccaagacttagtaagcagtttcattctatagaaaaaagaatccgcccatatcgagcggagcatcagcctaatgtgtgtttacgacaattctcacttcatacttttccatcgtcaggtcgcctgacaatatgtctcctgtcattatgtccttcacactctgatcaaacgtgaccagttgtttttcttccgtaaagttcatcacaaaaatataatcattgtcctgatcctgcctcgcttgtacggagacgccttttccgtgccgaaccggaaaaactggagaaagagacaggtctgtgatcagaccctcatagaaatcacgctgaaattgatcctccaaacgcgcgccgataaaatacgccttgccctgctgatactcatggcttgtgaccgctggcgtgcgcgcataaaaatcttcttgatacactgcttccactgaagctgtctttacatcaatcacggttgcataatccttcatttcatatatttggctgcgatagctgacagcgtttcgatccttcggatacagggtgtccgtttcaagaggctcaactccaaatatagcttgaaggtccggatgccatccgcctgtgtatgttaagtcatgctcattcacaaccccgctgatatacgtcatgactaaggtgccgccgtcagccgtaaacgcttttaaacgggaaatggtgtcctcgctgattaaatacagcatcgggacgatcagcagtttatatggtgaaaagtcttgttctttcgtgatgacgtcgacagggatatcgtgttcccagaatgtgcggtaatgctgctgaagcgtttgcggataacgttttgtcgccttcgcaaacccctgagcatcctcgagcgcccaatgattttcccagtcatataaaatcgcggtttgagccggcctcttcgttccgacaacttcggacagccgttccaatgtctcgcctaccttggccacttcttgaaagacgcggttctttgggctattgtcatgatccacaaccgctccgtgtaatttttctgatgacccccgtgatttgcggtattggaaatagagtacgctgtccgagccgtgggcaatcatttgcatggatgacagcagattcatgcccgggcgcttcgccttgttgacgttatgccaattgaccgcgcttggcgtacactccattaataagaaagactgctgcttcaagcttcggtacaggtcgttgataaaaccgaccttcatcgctaaatcagctgtgctttcccagtcattgtgccagacaggataagcgtcccagctgatgacatcgacatgctttgcaaatttgctgtagtcgaggccctgatacgggatcaaatccggtgtgtcagccataaaattcgttgtgatagggatatcaggcgtcagttctttcagcggaatgatttcatttttataaaacgaaatcgtttgatcggtgacgaaccggcgccaatctaaattcaggccatgcaagccattttcaccgatcggcgaagggctttcaatttgtgaccagtcattgaacgtatggctccaaaaaggagtccaccacgcatggttcaatgccttgaggctgttgtcatatttcgatttcagccactcccggaaagcatgctggcataaatcacagtggcaatctcccccgtattcgtttgaaatgtgccacattaacagcgccgggtgatgtccgtatcgttctgctaataagcggttgatgtgccgtgttttttctcggtagactttagatgtgaggcagtggttgtgccttccgccgtgcagctgtttgacgcgggaggcattgacgcgcaaaacttccggataggtttgcgacagccaggccggacgggctccgctcggcgttgctaatatgacccggccgcctatactgtgaatccgctcaaaaatatcatccagccattcaaattgatatacaccctcctccggctcaagtgcgctccatgcaaaaatgccgacagaaaacgtattcgtatgagaaagcttcatcagtttgatatcgtcagctaaaatatcgggccgatccagccactgatcggggttgtagtctcccccatggagcataaatttcgcttcggttacgtgcgttttttcaagctttgacatcacattctcctcctttttctcttagcccttcgttccgcctgcggttaatccggacacaaaattcttttgcagcatgataaagatgagggcaaccggtatgctgataagcagggctccggccgcaaatgtcgtatagctggcccccatgacatcattcactaaattgaatagaccgacgggcaatgtatatgattcaggcgttctcaatatggttgaggacagcacaaaatctccgagcggaccggtaaagccgttcatggccacgactgccgccatcggttttgataatggcagaatgatctggaagaagattctggtgctgctggctccgtcaatcttggcgctttcgtctaaatccatcggaatggaatccatgtaccctttcatcaaatacgtattcatcgggatcaggccgccgatataaagcaagattagcagccagtggctattgatcattcccaagatttgcgccagcacaaacaaggcaattaaagccgaaaactgaggaatcatctgcagcaataaaaagagcgttaaagcgtatttcctgcctttgaagcgaaagcgcgaaaacgcataggctgtaaacgtcacacagagcaaagaccctgccattgtaaacaggctgatcttcattgagttgacataccactgcacatattgaaggctttctttgcccgcaaataattccttgtaatggtcgaatgtcggatgcttcggaatgatggatgtactgattaagctgttgccagggttaaagcttgcgcctgccgtccaaaggagaggataaacaatgatgaccgccataaaggctagcaacaagtaagagaaaaggagacggatatattttctgactttcatatctgccagcataccttatgccccctctttaaaagactttgtctgtctgaattgccacaatgcgatggagataacaaatacagataataaaatggttaaagccgcagcaagagaatattggctggactgcattgtcaatttataaatccatgaaacgaggatatctgtcccgccggctgttgatccggttacagccggacctccgccattgaatagatagataatattaaagttattaaaattaaacgtaaactgggtaatgataatcggagccattgcaatgaacaccatcggaagcgtgatgtatctcagctttgaaaagacagaagcgccatcaatcgtagctgcttcatacagatcgtccgggatggattgcaatacgcctgttgagacgagaaagatgtacggaaatccgagccagccctgcatgagaatcaacgcaagcctcgaccaattggcatctgtcatccacggaagcggatctatcccgaagaaagccaagatgtcgtgattcatcgcaccgaagctatcattaaacagtcccgcaaaaattaaaatcgtcacaaaaccgggaacggcccatggcaaaatcagaatcgtccgaaaaaaacgtttaaaccgaaggtctttctggttaacaatgatcgcgagaaaaatccccaagctgacttgcagtgtggatgcagcaagtgtccaaaccaccgtccaagccagtacatcaaaaaaagtcgacctccaaatatcaactgtgaaaatatttgcgaacgtttgaaaaccgacccaatcaattaattttgcaggaggagaatgatacaaatcatagtttgtaaacgctaatgcaaagctgaataagataggaaagatcacggcgaaaattaaaataaacaaagaggggccgctgacgacataaggatagccctcagaaatgatatgttggtattgttcctttaaggaacttaatggcttattttcatcacgctgttttccgctttggaacgcatcgcgaagattcacataatacaccgcaaggccaaagcaggtcacgatgacagcgataattccttccgccagcagaaaaacggaattatcccgcggcacttctgttcccagtgtaaagattccccaaaaccccatattgagcagatctccaaagaccgcaaaaaacgatgcgcctaagaaaagaaagacaataccttttatccattgcttgttataaaattgcccgagtcccggaatgatagaaagcaacaaagcgacttgacgatgctgcaccgttttcacctctcttacaatacaaatctagctttctctttattttccgctgtgctttgccttaatttgtcctttggccgtttcagctgcttgatccaatgcttgtttcggatctgccttccctgttgcaaccgtctgtaatgctgaatcagccggcgtccatatttcattcatttccggaatatttggtgttggctctgagaaacgggattgttcagtaacagcccgtgccgcctcgcttttcataatagccgggtcattggctagggatttcacagcaggaacttctttcgtttcttcatatcgtgttttagaatttttttcatttgccaggaaaacggctaattcttgcgccagttcttcattctttgtaaatgcactaacgttgtagcttttgacgccgataaaggagctcatgtttttcctattttccagcttcggcagtttcgtaatgccataattgattcctgctttcgaaaaagcttctacattccatggaccagaaataattgcggcggcttttccttctgtgaacagcgattccaatacgttaatcccttgttctccaataatgccagccgggaacaggccatctttgtaaaacttctgaatcagcgccgcacctttgacagctccttcattattgattccaatgtctgacgggttatagctcccatctttgtcctttccaaaaatgtatccgccatatccgctcatcacactttctgcataataaatttgatcgaatagggctaaaaagccaaaattgctgccatcagctgtctttttggaatagtcgtaccactcttccagcgttttgggcaattccttttctgtgatgagatctttgttgtaaaaaagcacagtcgtttcgaccgcttttggcagtccataaagcttttgatctaccatttgagactgaatggaagcgtcagtataaagtgattgaacgtcttttttgacatgtaattccttgagtaatccttccgtgacagcggttccgatttggtcccctggcattgttaacacgtcagggcctgtgccggccggtccgtccattcgcaaatcttcaatctgcttggcatacggtttttcaacgactttgaccttcacatcatgctctttttcaaacgcagcaacggcgtctttaatgccgatgctcttttctttatcctcccatacaacaagctctgacccttttgaactcgatttggcgctgctgctttcctttgggccgcaagccgccaaggataaactgacagctgcgcagagcatgaatacggaacacttttttgccattttcattgattgtcaccctttcggtaggaatgaaagcgctttaaagataatatagcacgcttgagaaaatgtgtaaacaaactatttacctcatagagtaaatttttttacttaaataaaaatgacttagtgtcctaagtcattcttaattcatactcttcctgacgattaattctgcgcccacatataatgtttttaccgttcttctcttgtcctgcacttgttcaagcagtaattgaacagcgtttttacataattcatgtatatcaatatgaaacgtcgtcagaggaggcgagacatacttcgcgaagctgatgttgttgatactcacaatgcttaccctgtttggtatagcaattcctttttcgttcagggcttgcagacagcccactgctatcgggtccgctgcaatcataaaagcagtcggaagctgatcgcctaatgtgtcgatcgctgctgacatcaggcggtagccgttttctacagagaatccgcgatgacagaaaatatagcgctcgtccagcatggctttttccctcatataggatctgaaggtttgttcacggatgtccatttcatcctgattggtattcggatttttgtatgtgccgccgataaaaccgatgctcttatgccccttctcagccaggatgtttaccgtcttccttgtcatttgtgccaaatcgggccttaccgagtcaaaatgatcgggatcaggagttgaatcgatgaacacgccgttttcagtgagatttctgaggaaagccagctcttcatctgaaaatgtgccgacggcaataaacccttccgtatgttcaggaatgctctcgattccatccgctattttataagtggtcatatcgacattgaatgctttcgccagtttctctacttctaatctcatcgttttaaaatagacatcttctaattcttctttatctgtcagccaatataaaaacgcaatatgtttcaccagcggccttactgtttttttgcggtaattgagcttttccgccgcttcatagattttctcccgtgtttcatcaggaacagaaaggctttcatcgttatttaaaacgcgggaaacggttgagattgaaaatcccgcttcctgcgcgatatctttaattgtcgccattgcatctgcctccattattcagctcgcattgttttagtaaaatattttactttctttttcgcaaatgtcaagtgcacaaagccctctggctgcctcatgtaaaaagactgaaccatttgcggctcagtctcagttgttcgtatcattcggaaccggcggaattgcccgggaaatgagttggttattgcacattttcctcgaaatatcccgaaagcacatcttccacattcgtcaaatgcgccagcatggcggcttccgcctctgcaccgttcccggcagccacagcattgtaaatccgttcgtgctcctcatacagccgctgaacggaggtcttcttggaaaacagccagattttcctcgtttccctcattgtttccagcagcaatgatgacacgtgattcatcaagtgtttaagaagttcattttgagaagcgtccgcaagcgcaagatgaaatgcaaagtctgctttctctcccagctccccgtccgcttcaatgctgcccatttccttcagggcatcatgaattctttcgagatctgcttctgtccttttttcagccgctagtgaagccacgccgatttcaagcagttttctgacctcgagcagctgcttgacgtcctcttttttcatcagaagggcggctgagagcggctgagaaatttgattgagctcaaattccttcagatacgtgccttctccctgtttcatttcgacaagccccatcgcttttagcgcagaaagtgcctcgcgaaccgctgaacggctgacttgaaagctctcagcaagcgcctgaacagagtccagtttatcccccggcttcaattcgccgtttttgatcatatctaatagtgcatccgctacttcttcatatattttttttgttttaatctgtttgtatttcaatgcaattcaccccgtaacttgtaggtctggctgtttacgatctattatactctgttttgtgggccgccaaaagattttgactattttgtcaaaaagtcttgtactttgatttttttcaaaatataatgctaggtaactggtcttattacccagtcatcagatgatcatatcatctatagaaaccgcttacatatggcgccagtttatgtttcaaggaggggtttgggatgcaatggacacaggcatatacgcctatagggggaaatttgctattatcagcgcttgccgcacttgtaccgattattttctttttttgggcactcgcgattaaacggatgaaggggtatacagcaggcttggccacattggggatcgcccttatcattgctgtattggtttatcggatgccggcggaaaaagcgctgatgtccgcgacacaaggagccgtatacggattgttgccgatcggctggatcattgtgacgtctgtttttttgtataaaatcactgtgaaaacgggacagtttgatatcattcgcagctctgttctctcaattactgatgaccgacggcttcaagctctcttgatcgctttttcattcggggcttttttagaaggggcagcaggcttcggagcgccggtcgccatttctgccgcgctgctggtcggtctcggctttaatcctctttatgctgcggggatctgtttgatcgccaatacggcgccggttgcctttggggcaattgggattccaattacagccgtagaagggccgacagggattccggcgatggagatttcgcaaatggtcgggcggcagctgccgtttttatccgtatttattcctctttatttaatcatcatcatgagcgggttcaggaaagccttggagatctggccggcgattctcgtatctggtgtttcctttgccgttgttcaatatctcagttccaattttttagggcctgagctgcccgatgttttgtcagctcttgtttcaatggctgcgcttgctgtgtttttgagatggtggacgccgaaaacaacattccggtttgccggtgaacaagagtcggccgcctcaattgaaacggcgcgcacaaatccggcggcgcctgcgtacagcggcggacagatttttaaggcttggtcgccatttctgctgctgacggcgatgatttccgtatggggcattccatctgtcaaatccgcgctgaccgggcattatgaaggctctgcggtgttcttaaagtggctgaatgctgttggagaaaaactgactttttccccaggtgtgccttttttgaacaatcagattgtcaatgctgacggtacaccgattgaagcggtttacaagttggaggtgcttggttcggccggcaccgcgattttgattgccgcagtgctgtcaaagttcatcacggcgatttcatggaaagactggggaaccgtttttaaagaaacagtccaagaattgaagcttccgattttgaccattgcttctgtcgttggttttgcctatgtcaccaactcctcgggaatgagcacgacactcgggatgacactcgcgctgacaggttcgatgtttaccttctttgcgcccgttctcggctggctcggcgtcttcattaccggctcggatacttccgccaacctgctgttcggcaacctgcagaaagtcaccgcattatcagtcggcatggaccccgttctgtctgtggccgccaactcttcaggcggtgtcacaggaaaaatgatttcaccgcagtcgatagcggtggcgtgcgccgcggtaggactcgccggaaaggagtcagatcttttccgctttaccattaaacacagtctgtttttgctgctgctcgtttgtatcatcacctttttgcagcatcacgtattcagctggatgattccttaaaaaaatcctcccgtctagggaggattttatttatatcgctttctcgctgccgatgacggaatattcatttgatcgcgatattttgccacggtgcgtctcgagatttggatgccgtgttgttcatacagcaaatcgacaagcttttgatctgaaagcggttttgttttgtcctcttgattgatcaggtcttcaagatgcattttgactgcataattcgacgcatctccctctcctgaagcctcggcttttgctgagaaaaagagcttcatctcaaacagcccgtaaggcgtttgtattgttttccctttaatggcccggctcacagttgattcatgaaggcttagacagtccgccacctctctcagagtcagcggcttcattgcgcttcgccctttcagaaagaaatccttttggcgtgtgatcagttcattgataattctcgtgattgtctgttttcgctgcctcagcgcgcggctcagccagcgccactcctgatatttcgcagataaataggagacagtatcctgacaggagccggatgataaaagcgttctgtactgcggatgcagatcgatctcgggaaacgagcgggtattcagttccgctgcgatgtgcccgttttttacagtgataaaaatgtcaggctcaatatacacatcttgctctggccgggcaaacagaaggccaggtctaggatgaagagccgcgatatcatctgagatatcttgaatagtatgaagcggaattcctgcctccactgaaagcgctttccattttttttgcgcaaaagcatcaaaatgagctgaaaccagcatttccgcttgttcatttctgttcggcagccgctgtaattgaagaaggatgcattcctgcaaagatctcgcgccaattccagccggttctaatgactggagttttgccaaaacagcctccgcttccttggccgatacagataatcgccgtgctgcctcctctatatcttcttccaagtacccgtttgaatcaagcgaatgaatcagataattaaaaatctttttttcagtgtttgtcagattcatatcgagtgactgctgttttaacgcatcctgcaatgttttttgcggattacttaattgaaggcccgcttcctgtgcattcatcctgtttttgtttgttttatggtaagatagtggcggtgtgtctgtttcctttcgttcaataagagggttttccagtgagagctcatcaatgtactcggcgagttctgccgaatgatagccaagcagcgtgatggcctgcctgagctcctgtgtcagttgaggctttaatacttgtacttgctgaagtttcatatccatcttgctcactcccctttcttcattgtacatgattgagatcacaccgtatacatttatgaaaaaggagctgccaaagaaatgtctgaacttttttccgtcccttattttattgagaatttaaaacagcatattgaaatgaatcagtctgaggataaaatccacgcgatgaacagctactaccgttccgtcgtctcaacactagtgcaggaccagctgacgaaaaacgcagttgtcctgaaacggattcagcatttagatgaagcatacaacaaagtcaaacgtggagaatcaaaataaaccttccgctcacatgtgagcaggaaggttttccttctttgaggcgtgctggatgagacgggtgcttggcacgccttccatccaggtatgaaagtaattggcgtttttcccgtaggaattatcaatgaccgtgttttctttttgaagaagagaagacaggatgtggccgtgcaacctcgatgtttccaccgattcgtaacggctgaaaaaccgaatcgctttttggacgatataatccgagtatttttcccatatatacgcaatgggcaaagggttgcctgcttttttattcaagacgttcagcgtttggagaaaagcaatcgtccggcggtctgaagctgacagcaccgtgcgccagtcgtagctttccgcttctgcgtgtccctgaagcgcctggtttgcttcatgatctgttcggataaatctcagtttttgattggacggctgctgcgtgggaatgacgggaaacagctgatgaaccatatcaggcagaagctgaatgtgatttcttgaaaaataagcctgtgccgtagcataggaggctttttcccttgtcataatgtgaaggttcgcatgcttagaaaatatctctgccgtccgtttgaggttgtctttgttttgaaaataaatcgattgcggcaggatcacaattttgtggttcggataggtttggacgattttctctctaaagccttgataatacggatacagatccccgaagtttccgcctccctggcagacgatgatgagatgaggatccagctttcgcccgactggaaaattgtcaggattccagcgttttctgacccgaatcccgtgttctttaaagaaggcttctgttcctttcataataaataaatcccctacattcccatatagaggatagtcagcatatataatctctgattgtttcggtatgacgtcgagcagcccggacagtttctgtttcaggctgatcatcgaatgcttgctgtccatttcttcacctcggcagtttggaataagtgcagtagcacttcaatgacccggtcttgctcatcttctgtcatattggaccccgatgggagacagattcctcgcttgaacaaatcttcgcatacgcttcctgtatcttcatgagaataaaataaagccggatcgaatagcggctgggtatggagcggcttccacagcggacgagcttcaatgttttcttcagcaagacgttgaactacgtcatatgggctgagcccgttatcaagtgtgagcgtggtgagccagcgattggatacgcctgctgcgtactccggcataaagcggacgccgtctatgtgaccgagcgcattgttgtatctcgtgaaaatggtccttcttttctccactcgctcatccagcacctcaagctgggcaatgccgacgccggctaagatattgctcagcctgtaattatgaccaatttgactgtgttgataatgaacagccggctctcgtgcctgcgaagcgagaaatcttgctttttcaattgctgcttcatcatttgaaacgagcatccctccccctgatgtggtaatgattttattcccgttaaatgaaaaaatgccgaagcgcccgaaagttccgctttgcttccctttatagactgtgccgagagattcggctgcgtcctcaatgacaggaactccgtatgcatcacacaggcttacgatttcatccattttcgcgctctgcccatacagattgacggcaatcaccgcttttggcagtgttccatttcttttcacttcctccaatgctctttcaagggctgtcggcgacatattccacgtatcaggctcagaatcaataaagacgggcaccgctttttcatatagaatcggattggcggttgctacaaatgtgaaggactggcaaaacacgctgtcaccttcttttacctcaagtaaacgcagcgcgagatgaatcgccgccgttcctgagctgaccgcagctgctgcttttacaccgactcgttctgccagctgttcttcaaatgaattcacgagcggcccaagcggcgcgatccagtttgagcgaaaggcttctgaaatatagtgctgctccctgccgctcatatgagggggagataagtagatttttttatgcatagaatcatcctttgtttgatgtttgaatggaagaaatgatgcgtgccggagcaccggccgccgttaccctgtccggtatgggacggatcaccgcggagccggcgccgacaatgctccaagccccgattgtgatctgcggtatgacggatgcaccggttccgacgtgagccccttcctgaacggaaaccgctcctgacagcgtggcacgcggagacagatggacataatcgctgatctgattgtcgtgctctgccactgcacccgtattgatgatgcaatgagcgccgatgcgcacatccgcctgaatgatcgcgcccgccataatcactgtcccttccccgatgacagccgacttgctgacgatggctgacgggtgaatcaatgtaataaaatcatctttcctcagacccagtcgctccgccagctgttttctgacactgttattcccaacagcaatcagaaacagcacatcaggaatgagcctgcgcagttcagtaacggcttccggcggtcctgtgtaccattcttttccgccttcgaatgttttgaatttatcatccagcaccgcggctaagcgcgtatctgagcgggcgtttatcagctccctgatcacctttccatgaccgccgtcacccacaatggccacgtttttcatgaggacacatctccgcttccggtaaaccgttccgcggtcacatgattggtttgctgaatcccttctgaaacaaggacctttcgcaccgtcaaacataaaattttcaaatcgagaaaaaatgaccggttgtcaacgtaccaaacatctaattcaaatttcttttcccaggaaatcgcgtttctgccattgatttgcgcccagcctgtgatacccggcttcacctcatggcgccgtgcctgtttttctgtataaagaggcagatagtccatcaaaagcggccgcggcccgacaaggctcagatcgcccttcaggacattcaggagctgcggaagctcatcaatgcttagctttctgatcagcctgcccgttttcgtcagccggacttcatcgggcagcagatttccctcactgtcccgttcatccgtcattgtccggaacttgtatagggtgaacggtttgccgtgcaggcctggccttacttgcttaaagaagacaggtgatcctattttcagcctgacaacggcgatggtgaacagaatgatcacactcgtacagcacaacaaaaaaatggcggccgtcagatcaaaaagtcgtttcaggatcaaagattcacagctcctttcgtttttcgaaaccgttttagtaccagctgtctttcctcttttgtacaaacgagcataaaagcgaaaacagcgtagcaaaagctgactgtcactcccgtcgctatcagtgacggccatccgtcaaccttcacaacgaactgaattgccttacagaccgtccaggcaaacacagcggctgatagaggcccgattatgcctttaaagaaaacgtgctttttgtagcctgtaatgcgggatacataaagcggcgtaaagatggcattttttaaaataagagaaatggcccctgccaacgttatgccgtacagaccgagatgagccggcccgctcagcgtgaccgccagcaccacattcaccgcacctaacagcagggtaacaatcgccggtgttttttgttgattaaaagcggtccatatataaaacagcggcataaaggcgaggctgacaaccaagtatccggcatgaataaataaaagcggtgctatcgttgaaaaggacggtccgagccagattgtcaaaaaaggtcccgccaatccgcccaataaggcagcaggaagtgcaagcaaaagaccattgagccttactgccttattggcgtaattcatcaacccttccatatcgccttttgaataatatgaagtcatgataggcgcaaacagggatgcgaccgttccggccaagctgcgcaaaagcagcggaaactggataatcgccgcgtatttcccggatgcggacgcccccagcatcaaattggcggttaacagatcaatctgcaaaaaaagcaggacgccgatttgattgacggagctccatgcgcccgcttgaaacagctccttgcttgtgcggaatgaaagatccttcatacgaaacgaaaaccacggaatcagctttttgaagaaatagaaagacagcacagacgcaatgacagcaccagctaaagctgcaagctggatctgccagattttcggcgcaaagcatgcaaacaggagcagcacagacagcacccgtataagcatttgcaccgcctgaatggaactggtgatataaaggcggttggcataaaatggtgcagcaccgaaacccgccatcagaaacgttaaaataaacagcacactgccgattaaaatcgacaaacgcacatctgccaaaagcgcttgcggcacattcatgacgcggtcaataaaaaaagccgaacccgcaagcggcagcaagagcagcaatgaaatcaaaacagaggccgctaaataattgctgatatacgcatttgctttctcccgctctcccctgtgggcagcaacagaaaagaaccgaacgacaaccgagctgagcgccacggtaataaccgaaaagtaattaatcacattttgtgtcaagtgaacaaagccaaacgcttcgacaccgagcgttttgacaataaaaggcgtcatccaaaccgataggaaaacagacaagagaaaagccgtgagattcgcgctgaaatttatcgtgaatttcatgcctgcttcgcactgcctttcattgtcccccgctgctcgaaaaacagcttgatgagaaaagtgagccgccatttacacagtgctaataccaaacgctctcctcttaataatttctcatgctgaaacggtgtatgtctgacagcctgccgcaccatgtcataggataaaatctgtctgatcttctttttgatgtctttcggcgaattcggagaagcacaggcatttgccaaaagcatcggaagctggtgcctgcaaatgtacacattcaaatcttcttggcatgcgcctgctaagccatagtgattgtagaatgcgattttagcttgatattgtttttgaagatgttcatccatcgccggcttataagggatttctgtcaggctgttcgggttttcacgataaatgtacaatccttcatcaagcattttcacccgctccgcttcgcaaaaagcggacaaattgaagggagagtcttcagcaaaacggatgtcttcagcaaacagcagattcgccctatcaaaaagctcacggcggtaaagataacgccatacataccagataaatctcgtttcgtgagcatgtttaagctgttcagtcatttctcgttttgtcagcacgcggtttgcctcaagctgcggcggcacatatgtccgcctgtccgatgactgtttgtaaaaaccgcatccgacgatgtcgagccgattttcctccgcttcttcagccagcctctggaacatggcggaaaatacataatcgtctccgtctacaaagccgatgtaagtgccccgcgcggcctttattcccgtatttcgcgctgaactaagcccgccgtttgcctgatgaatgacccggattctcgcatcccgttttgcataatcctctgcaattttgcctgaacgatccggtgttccgtcattcacgaggatgatttcaatatcagaaagcgtttgacgaagcaaagaatcaatgcactcccctataaatggttcaacattatacatcgggacaataatgctgacgagcggggtcattgcgcttcaccgctgattttgtcacgcagacctttaaaatacacatctctcggaaagcctgcacgggatgtttcttttgttaaaagctcattgactgcggctgttacgcgctctggctccggatgttctatcagcttcatgaacgggatgtctttaagccattgatagccctccatcaccttatggtcaaaggagcgaatgacaacacacggcgttcctgtcagcgcgcaaaaaatcatgccatgaagcctgtcagtgacgacggcttctgcgctttgcagcttagaccacagtgcttcaagttcttgttcgcgtgtatcgcggctgacccggcggccgatcgttgtcgtaaaggatttgatctcgccgaattcctcacatagcgcagccttgacccggttcctctggtcctcctgaagcacgctttcctgatcctcgcgcaaacacatataaaccccttcgcgttctgcgggggtcttgcttctatctaaatacagcaccatgtccggctgcttcaaaattgttttttcttgaaaatgctgtttcataaattgatacgttgtttcatcccgcgccatcagcaacaggccggggtgcgcattataaattttctgtgcccgtttcagctctttgcgcccttttttcgtgtcagaaaaatgagccgttgccggaagctggacaacccgatagtcatggaatgttttaatgatgaagcggcgcgtccactcctcataacggtataaatcccccatatttccgccgccgatgataaagaccatatcctccggatggcgcgagcggatcaggttttttgctgatttgtaaatgtccttcatatcgacctcgacgatgtcaaagtccgggtattcttgctcaagaaatgccttgctggcataagcaattgcgtgatctcccaaattgtcatgggacggcagcagggtcagtatgatttttttctgatgtgctgcggcctttaccggttgatctgccgctcccagccaatattgggacgggtatttgacctttagcagcagccattctgcaaaattgattttcaacgattgtaacgacatgtcctcaccctctgtttctcattttgtactcgatcacccgctgatacatagccgatgccatagcgacgaacggaatcattctgtatttcgccatcagaagcaggcatgaccgttttgcgtcaaaaggagcggtacccgtttttgaaagactttcttgaaacaccgggtccgcgcatatcacgccaacatttctaagcttttcaaacagtcggcggctgccgctcgttttccattcattcagcatgcagatgctgctgtgaagaacgataaaggtatcaagctccttgcgatactcctccagtttgttgttctcctgtaaaaacgccgcattcgcctcatacagcgcaagtcctgattcaaacaattttttctgatagcgctgcacaatggaggaaaggtgaattcggtaatgatagagcggcgtttttacgtaggatactgagcgggcgaaaaaatgagccctgaagctgaaaaactgatcctcgacatgctccagctcgcctcggagcggaaacgacagccgatgggcttcaatcatgcttcttctgtacagtttgttccatgaaaaccctctgaccttcccttcgaataatgccttgatatagtgctccttcggctgatcctgataggtttgggcaatgtctgagtccatggttttgccagtgtcctcaaactctgcggcgtaattgcaaatgaccagatcagtttcatcgcctgctgcccggagcatctgctcgcaataatcaggttcgatccaatcgtctgaatcgataaacgcgataaattcgccgcgtgccgcttcaatgcctttattccgaaccgcaccgagtccctggttttcctgatgaatcaccttgaacctgttgtccattttggcgtattcttctgcgatatccgggctggcgtcagctgaaccgtcattgacaatgatgatttcaatattgtccactgtctggttccgcagtgattcgagacacgttctgatatatgtttctgtgttataaacagcgactaacagactaaccgcaggtgtttccataatgaccggctcctcgtgcataaattaccgggaaaaaatcgttctgtaaggcagaaccgatgaatcaaccggcataagcaaataactgtaaagaaaataacaaacaacgatagcgatatagataagggcgttcgatttttcatcaaatatcctgacaaaataagggactaagatcatttgatacagaccgaaataaatattgaatctggcaaaaatcacgtcctttgtggccaaaaggccgaacaaaaaaccaagcaggcacaaattgacgacaatatcgatttgcggccacagactccgcaatcgttctttatagcaaaatgcaaggaacagcggcagaaccaaaacagcgattttgatcacattcattccatttgtgttcgtcatgagccatttttcataatggctgtatgagctgttttcaagtacaacgacaaacacagaaataaatttttgatataaaaatgtcatgccgagaaataaagcggataggccgaatatcgccggagaccaggcttttcttctgacaataaagtacaccggaatcataatcagcgccgacgaatgaaagagcgagctgacgagcacaatcaggaaatatcgcttccagttcccgctgatgatataacggatcgcccaaaacaaagcagctgccaccatgtattgcctgatgccgttaaaagacgcgtagtaatgaaaggttcccaaaaacaaaaagacactcagctcaaacggcctgccatagtcggcgagtgtcttcataataaagctgtaggtcacgaccgccaccgtaaaatacatgatttgaggatcttccgtgatgaaattcatcagccaaaggagtgcggtaaaccccggatctgtcgctgttttcgctgtgccgaaaccgaatatctgccacacattttgataatcgcccgccaattcgtacagcagcgtgtacgtctgaaaatccgtgccgactcgatagcggagacctgacacgagcacaagtgaagcgagcggaatccagatcaaaagcttattcggccgataccccgtggcaagcgaatcgtcacggccgccgcacattttagcgaaccaagaccaaataaatacaatccccatattgacggcatatacaatcatcggttatggtccttttccgtgctgatgttgtatacattcagcagcgctcctacattttgctgtgcatcgtagccaagttgagcgagtgtttctttgatgaactcacgcttcggcctgcctgcggcggccgcccttgcaatggtttcagcccagacgctgatcggttcagaaagacttaatcttgtgacaagcccgagaccggcgtcgactttttctgtaatgctgcctgaaatgatgcatggaagccccgacgcctgcgcttccacaagcacaaccggcaagccttcgtacagagacggcatgacaaacacatcaaatgtgcgcatcaattcatggatccgttcttcagtgcctaaaaagagaacatctgatagcagattctgccggcgcgcctcctcctctatctccccgcgcaacggcccgtctcccgccagaacgagctgaaagcgaacgcctctttccttgagatgtgcggcaagcttcagcaggaacgcgtggtttttcacttcatgaaaccgggccacatggccgatgatgagccggtcggctgcaatgccgcgtgctgctttttcttcatcagccgcctgcccatttggggcgaacaactcaaggtcaatcccgttaggaagaaggtgaacacgctcccgctccatattggactgtccaaataaaaacctgcccgcatcctctccgcaggcacacagcgctgtcgcatttgccaaaatgagccgcctgaacacgagcagctgcaagcgatccttccagttgaagccggtcttccaagacgtattgtgggaatggcataccctgaccggcactccggcgagccttgccgcaagggcgataaaacccgtttggaaatccgtgtgcgcatgaacggcgctgaacggcccgttttcttttatcgcttttctcacattcctcacaaatgtaaggggattgctttgcccaatgctcgggacataaaaaagacgcccgcctaaagataaaatctcttcatcataagcgcacggatcatttcgatacgttaaaaaatcaaattgcactttgcttttgtccatcttccgatataaattcattaccatggtttccgcgccgcccctgttcatgccactgagaacatggagtacgcgcttttggctgctattcatgcttgacaagcccttccttttggttcatcactctttttttatggtagcgattcatcacggctgcaggcataaacgcgcggattaacggttttgcgatatatatgtaatcagataaaggaagcttcaagcgtctgcacgcctgatagacaaggatggcattgtcaattgaatacgtaaatgaccgccgtttgaatgcatcgctgtcttccctcactttatacaaggcttcctgaagattatagcccctgaagccctcttcaaaaaagcgaagccacaaatcaatatcttccattcgtctcgtccgccgcaccgaccggtagcctttcagcgtgcggtaggcactcgctctcatcataatcgtgccatggcaaaatggggtcccttttgccatgatgcccggctccggaacagaaggcagaatgcgggcgcctcttacgccaaattcatcaaacacaagcatgccggtgccaaccacctgataatgtcggtgcttttctaaaaacgcgacctgcttttccagacggcgcggaaacgaaaggtcatctccatcctgacgtgcgatataatcgcctgtcgcatgcgaaagacaatgatttaatgatgcggcaagccgcttatttgttttgttttgaatcagtttgatgcggtcgctgtaatgagcggcatactgcttcgcgatgcggagcgtgccgtctgttgacgcatcatcgcacaaaatcagctcccaatttttataggattggctgagtatggattctatgctttctgccaaagtgcgttcgcaattataaatgcccataatgacagaaactttcggtcctgagttcatacgcttttctcctttgtatccatatccatgtacgcggaataaatatctgccatttcttccaccgttcgcgcctccgagaagcgcaaggctgtttttcggccttcctgtcccagctttcggcagagctccggcttatggtaaagctgttcaatccggcgggcaaaagcagcactgtcaccgattttgaccagaaaaccgttttctccgtcgcgaatgatttcccgatgcccgcgattatctgtggcgatcgccggtttttctgccgccattccctcaagcacattcataccgaggccttctctaatgctggatgcgacagatacatccgcaagctgaatcaactcatgtatgtcgctgcaaaagccgtaaaaacagacattggcggaggcaccaagcttttcagctaacgtttgatacgtatgttccattgccccttccccggcaaacacaaggcggagtgagggaattttttcttttagcaaggctgcggcttcaattaactgcttctggtttttgttcagattgagctcagccggataaaccaatataaaatcatcttcacggaacccgtgcttttctctgagtctttgctgctctatcggactgacaggccggaaacgctcggtgttgacgccaatgccgtgaattttctgcgtccttccgcccggcctttgaagtcctttcgcccgtatgtaatcctcttcattaatcgtaatcaggcagtctgtatatgctgaaagccatttctcaaccggatagtaaagaagccaatttttcatcggtgcccctttgcagaagtgaaatccgtgtgctgtgtacagcacctttgttccgtgccgccgtgcctgcctcgccgccagtctggcgagaacgccgccgaccggtgtatggcaatggacaatgtcgtattcataggtgtcaatcactttcttcagctgcctataaacggccaggttctgagggtcaaaaggtgacctgcgaatcgggatggagaatttctcatccacatacggcagcttggtttgtccgttcgcagcgacatgaacctcccagcccatttgtttgaaccatttaaaataagggaggtgaaaggccttaaaatgataatcaacagtcgcgcaaaacaatatctttttcgtcattttcactccccctaatgaacgctggcagccgtcatttcttctgatgtattgattgccgcaaacagcctcgctctcaggtcggcttccggcagctcatgaaaatcctcgataaagcgcatcagcaccggccaatcgccgtccaccgctttaccgatgtgaatttttggaaagatttgttcagcatggacttcatttttgttcagcaattcttcatacattttttcgcccggacgaatgcctgtgaattcgattggaacctgctcagtcgtgtagccggacaaatgaatgaggtttttggcaagatccacaatctttacgggctctcccatatcgagaacgaaaatctgacgccctttcgccagtgccccagcctgaatcacaagccttgatgcctcgggaatcgtcatgaaatagcgggtcattgccggatgtgttactgtcaccggaccgcctttttcaatctgttttttgaaaattggaatgacgctgccgcggctcccgagtacattgccgaagcgaacagcgacaaatttggttctgctgactttcccaagattcataataatcatctctgcgaatcgttttgtcgcccccattacgttggctgggttcaccgctttgtccgatgaaatcagcacgaatgtctctgttcccgacatatcggctgcttccgcgacattttttgttccgataatattgtttttgaccgcctcttctggattgtgttccattaaaggcacatgcttatgggcagctgcatgatagacaacatgcggctcgtattttttcatcaaggtaaacattttatcgcggtcctgcacatcagcgatttccgtatggaacacaatgtgtttgccgaatcgtccgttcagctctgtataaatcgaatgaatgctgttttccccatggccgagcagaatgatttccttaggctgaaacgcgctgatctgacgacagatttccgagccgattgatccgcccgctcccgtgacgagaactgtttttcctttgatgcggttcgaaatttcgctagtgtcgagggttaccggctttctgccgagcaagtcctcagcttttacatctctgatttgtccggcagttcgtgtgccaagcagcatttcatcaaaatgaggcataattttaatgtttactccggttcgcacacattctttatataacacctgaagctcatgggtgcggagtgaaggaatggcaataataatataattaattttgagcttttgcaccgcaggcatgatactttcttttccgccgattacgggcagccccataatttctaatttatgcttcgtttggtcgtcatcaataaaagcgacaggtatgatatcaggttcatctttcgaaagcagctgcctgaccatcagagtcccacctgagcccgccccgataatcagcgcgcgggacgaggcgcagcgttttttcctgatgctttcgtttaatactctggataaaatacgggtccctccaatagacaaaagctgaagcacccagcacgcggttaacagacggaagaacatcgtgtgatacacagcatactgaatgacgccggtcacagcggctgaaagcgtaatgcccttaagcaggacaatcagctcgccaagcccggtgtatgtccacacctgtttatactgattgaacaggaaagcacacacatgatagctgagaagcaagctgacagcagtaagcagtaatgctccggagtcataaaattgataggaatcttttaaaaattgatatcctgcaataactgaatttaaaacgaggtaagtatccagcgcaataatcattgacagtcttctccggtaactcaaccttttcccccctaattcttttatcggtttagctgcggcggttttcgtctctccaaaaaatcggcagcagctaaaccgacaacacgtcctatgtatatatcagataagtgggcatttaacccatcctcacgccccgccagcgacgaccagcatctaaggcagcaacttcagctgcccacagcagagccgagtgcctccattgatacaggtcaggagacatcacctttacaaaaactagtaggaatagtgttccgattttttcattttctttttgtttaaaagagcgcctaacagcttcgcattggattgttccagtgcatcctttgctttcagaacggtatcggtttttgtttttccgcttaaaacgacgagcacgctgccgtctgtctgatttgctagaatctgagcatctgcaacagccaaaagaggaggggaatcaaagatgacgaggctgaattgttcatagatctcagatattaaatctcccattgcttttgaagacaacagttctgccgggtttggcggggtcggcccgcttgtcagtacatataagttatcgatcggcgtcttttgcaccgtctcactgagtgaagcattgccgaccagcacatttgtcagcccggttacattatcaacctgaaacgtctgattgatggtcggctttcttaaatcggcatccaccagcagtactttcttttcctgctgctgcgcaaagacagccgcaagattcgctgcactgaacgatttaccttcaccaggcacagaggaggtgacgaggatagatcgcaagttggtctggacagatgagaactcaatgtttgtccgaatggtgcgatattgttccgcaacaactgatttattgtgtaaaacagatatttgagccaaacctcgccttgctttcttttttctaaagatcactcgcttcactccccgaaatgttttatcccacgattccgccctttgtggacatcaggaacggagcctaagcatggcaatccggttctctcgctgagctgccgtgcgcttttgcaagtatcatcgagaaaatgcagaaaaaatgccagtgtaatgccgcccatgacagcagcgccaaaagccatgaccatatttcgcagcctggccggcttgatcatcgggctttcagaagccttcgcctctgataatatatgtacgccttgtacattcattctttcatctacttctttttcaaacttgttcactaacgtgttcgcaatctcagccgctttcgccgggtcgtgatcctggacggcaacgttgataatttctgattcattttcactgctggtaaccacttttcctttcagcgaggaagccgattcagataggtgcaattccgccttaacttcttccatcaaggcagtgcttttcataatcgattggaacgtgctgctatactgaagatttcgctggatgtcactgagattcgagttttcttcaccgtctgattcatgaaccagcacctgtgtcgacgcctggtaggtcggtgaaatgaccttaaattgcacaaaacccataataagggtgacgccgattgtgatgagcagaatcagcacgaatctgtgtctgacaatcgcatataattctttgaaactcatattctcattcatgtattcatagccttcagccttcccgcggctggcttcccgcgcccctttctgttaatgattggattataaaagaaaacgttattatttaaaaattgcaaaataagccaataagttctctttagagaacaaaatcatgattttcctctaatttactgcacttcccttattattttaaattttataaagaacgaaaaattctttataatgaacaaaataacgacaggaatagaggagaatttcatattatgattggaagaattatccgtttgtaccgtaaaagaaaaggctattctattaatcagctggctgttgagtcaggcgtatccaaatcctatttaagcaagattgaaagaggcgttcacacgaatccgtccgttcaatttttaaaaaaagtttctgccacactggaagttgaattaacagaattatttgacgcagaaacaatgatgtatgaaaaaatcagcggcggtgaagaagaatggcgcgtacatttagtgcaagccgtacaagccgggatggaaaaggaagaattgttcacttttacgaacaggctaaagaaagaacagcctgaaactgcctcttaccgcaaccgcaaactgacggaatccaatatagaagaatggaaagcgctgatggcggaagcaagagaaatcggtctgactgtccatgaagtcaaatcctttttaaaaacaatgggaagatgatgatcggttaagggctaacgttcgcatctatagggtaaatctgtttataatgggggaaaaagggagagaacacaatgactcatcaaatagtaacgactcaatacggcaaagtaaaaggcacaacggaaaacggcgtacataagtggaaaggcatcccctatgccaagccgcctgtcggacaatggcgttttaaagcacctgagccgcctgaagtgtgggaagatgtccttgatgccacagcgtacggccctgtttgcccgcagccgtctgatttgctgtcactttcgtatactgagctgccccgccagtccgaggattgcttgtttgtcaatgtatttgcgcctgacactccaagccaaaacctgcctgtcatggtttggattcacggaggcgctttttatctcggcgcgggcagtgagccattgtatgacggatcaaaacttgcggcgcagggagaggtcattgtcgttacactgaactatcggctggggccgtttggctttttgcacttgtcttcgtttgatgaggcgtattccgataaccttgggcttttagaccaagtcgccgcactgaaatgggtgcgggagaatatttcagcgtttggcggtgatcccgataacgtaacagtatttggagaatccgccggcgggatgagcattgccgcgcttctcgctatgcctgcggcaaaaggcctgttccagaaagcaatcatggaaagcggcgcttctcgaacgatgacgaaagaacaagcggcgagcacctcggcagcctttttacaggtccttgggattaacgagggccaattggataaattgcatacggtttctgcggaagatttgctaaaagcggccgatcagcttcggatcgcagaaaaagaaaatatctttcagctgttcttccagcccgcccttgatccaaaaacgctgcctgctgaaccagaaaaagcgatcgcagaaggggccgcttccggcattccgctattaatcggaacaacccgtgatgaaggatatttatttttcaccccggattcagacgttcattctcaggaaacgcttgatgcagcgctcgagtatttactagggaagccgctggcagagaaagctgccgatttgtatccgcgttctctggaaagccaaattcatatgatgactgatttgttattttggcgccccgctgtcgcctatgcatccgcacattcccattatgcccctgtctggatgtaccggttcgattggcacccggagaagccgccgtacaataaagcgtttcacgcattagagcttccttttgtctttggaaatctggacggattagaacgaatggcaaaagcggaggttacggatgaggtgaaacagctttctcactcgatacaatcagcatggatcacattcgccaaaacaggaaacccaagcaccgaagctgtgaattggccggcgtatcatgaagaaacgagagagacgctgattttagactcagagattacgatcgaaaacgatcccgaatctgaaaaaaggcagaagctattcccttcaaaaggagaataaatatggggaaaacaggatacattggtgctgccattgttgtggcagcttgtatcattattttgtcggccgtggtatgtttacgggacacagtctattaccagcctatgcgctggactggcatcatactgtttttcgtgggaattgtgatggttcccgcatactcagcaaaaagaaaacccggaaaagagaagtaattctcttttccgggtttttatgtttattataatcttcccgcgcgaatatcgtctgtcattccctcataaggagccttcgaaatcacttcttcgttgtcgactccttcatttttcagaaatgtaatttccgcaaattcaggtacaacgtattttggatacgtttcatatttttcgcgggattcttccatcaaatcaatgtggtcattttggtagcaaaccgtaatttcaggatgttcatgcacccatttcgggaagaaaataatgccgtgcatgcgtttttcatttggcataaagtttaatgaaacatccgtgccagtcggctctgtccaagacactttatatacgccttctgtcagtttgacaatattcacttcctgatcccgaacccagcgtccggcaaccattccgctatgaattctataatcaattgtatggtcatttttaatataaatctcgtattcccagccgttttcatacgtataaatcatgtggcttccgataaagttttccatttttcacactctccttagtcttttactgcacttcataaatgtctagtcgaacgtaatcaggggttctttctgcggaaccgataaacaagcggtcatggagccattgatagactttactgcctgtttcaaacgtcggtaccgtacgaaaataaacatgctccggatcaatgatttccccggctgccgcttgttttcgaaacggctcgctgacttgccgtattccattgttttcaatgtaaatcagttcatgatctgctgtttcgatcacatacctggcagataaatcgtttctgccgtcagcgcgaatcatttgcgaatcggcaccgctcggcaaaatacgtccctttacttccccggttattgttcccgaacgaatcggaatgaatcgtctcagtcccaggcctgtctcaccaatcgtgataggcggatcaaccttgatttctaaagaggcgaatggttttaaaaccggcttcttcacgagaaccacctcacctccagaaaaaatcatgtaactatttacatgtttaatttaacactattgcagttaactgtcaaacaataggaacataaaaaaacaaggactgtttgaagacagtccttgtctgaagctagctttgataagcaagatatgtgctgacagtgcttttggcaagacaggcagaggaatctataatcggaatctcactttgaatatgatctaacaccgcatttaaatccgtgcaggctgaaatgatgatgtctgcatgctgactgatttcttcatatagcgtctgccacaatgcttgtgtatgctgcatatgatttggctgtttgattgcggcgataagctggttcacagcctgctgccaatggtccttgtgaacaacttcttgtccatttgccttcagaactttttggtagatggcggattggatggttggctctgttcctaaaaccaccgctttttttgcaggatgcggaatctcttttatcgtttcctcaacgatatgcaacataggaaccgacaatgcctgctgaatctcttcatagtagacatgcgccgtattacaaggcagcgcaatgaaatccactcctgttttctcgagctttaccgctccgtcgataatcgcttttttcatctcgtcatggtcaattggacgatctgcatagaagggcgtcgggcatgaatagatcatcatgtgcgggtagtcaatatcgtttgaagccccatacagcttctgacagtaatcaatcaccttatcaataaacggcgaggtcgatttcggccccattccggctaatattccgatcatcaaattcattcctttctaatttgtacggaccgcttcttcttctgagccatcctcatagaggataaagcttttcgcagcatccccgcctaacataaactcgacttcaacagacaatgctcgcagaaagaaacgggtttccgaggaaggaaataactccagtctcagctgtccggtgatctccaaataaagccgttcattctcggctgtcacctgtgcagccgttccatcctgcaacaggtagctgccaacatagcggctgtatatcgccgtatcaattgcttttttctttttatcagcaggacgttccgggacctcatatggctggccaaatagaatatgttccgccgccttcagaatcgcttgttcatattcagtatcctcttccttattactcaaatagatcagtgttttacgatgatcgatatatcggatcatcaacgtcgaatagccgggccatcctccgctgtggctgacaatccgccctttttcaggactattttgcagtacccagccaaagccataatcaattgtttctccattgttgaggcgcactggagaaaacgcagattccttagaagccttgctgatgaaatcgtcctgatataaagcctgatcaaatcgaaacaaatcgcttgtgacagagttcaccgtcccatctccctgtatgccatcgagatacacaacatagttcgtttcctccagctcatcagggaggacgtatgtttcggaatgtacatcatacacatatccatatgcataatgatcaattcgctcaggcgaaagcctcctgttatacactcttgtttcattcatgccgatcggtgaaaaaatacttgttttcataaaatccgcatagctcatgccagatgctttttcaatgataaccgccagcagcacataccccgtattgctgtacatccagccttcattcggttcaaaataaccagatagcccctcattcatcagcatatcgacaatatcctgattcaccgcaatcttgtgtgaatcccaattggcaaaaaaccatcccatataatcaggaagccctgacgtatggttcaataaatgccgaatcgttacgccctgatacggaaaaccgggcagccagcgatccactttatcctcatagccaagaatccccttctcctccagcaagatgattcccaatgctgtaaaaggctttgacaaagacgctaactcaaacaaagagttggttttcaacgggcgtttttccgtcatttccgcatagccaaaagagtggtgatataaaatatcgccaccctccgcagccagaaccgtcccgttaaactgatgtttttcgcctaatgtctcaaataatgtctgaagatgctttcttttattctgtttcattcctccacctcccatatctctgtacgttactaacctactaacgtttcaaatattttgaaaaacccttcagttagagatcctttttaacccatcacatatacctgcggttcactactatttagtgaaatgagatattatgatattttctgaattatgattaaaaaggcaactttatgcccatgcaacagaagctataaaaaatacagagaatgaaaagaaacagatagattttttagttctttaggcccgtagaccgcaaatccttttatgattttctatcaaacaaaagaggaaaatagaccagttgcaatccaaacgagagtctaatagaatgaggtcgaaaagtaaatcgcgcgggtttgttactgataaagcaggcaagacctaaaatgtgtaaagggcaaagtgtatactttggcgtcaccccttacatattttaggtctttttttattgtgcgtaactaacttgccatcttcaaacaggagggctggaagaagcagaccgctaacacagtacataaaaaaggagacatgaacgatgaacatcaaaaagtttgcaaaacaagcaacagtattaacctttactaccgcactgctggcaggaggcgcaactcaagcgtttgcgaaagaaacgaaccaaaagccatataaggaaacatacggcatttcccatattacacgccatgatatgctgcaaatccctgaacagcaaaaaaatgaaaaatatcaagttcctgaattcgattcgtccacaattaaaaatatctcttctgcaaaaggcctggacgtttgggacagctggccattacaaaacgctgacggcactgtcgcaaactatcatggctaccacatcgtctttgcattagccggagatcctaaaaatgcggatgacacatcgatttacatgttctatcaaaaagtcggcgaaacttctattgacagctggaaaaacgctggccgcgtctttaaagacagcgacaaattcgatgcaaatgattctatcctaaaagaccaaacgcaagaatggtcaggttcagccacatttacatctgacggaaaaatccgtttattctacactgatttctccggtaaacattacggcaaacaaacactgacaactgcacaggttaacgtatcagcatcagacagctctctgaacatcaacggtgtagaggattataaatcaatctttgacggtgacggcaaaacgtatcaaaatgtacagcagttcatcgatgaaggcaactacagctcaggcgacaaccatacgctgagagatcctcactacgtagaagataaaggccacaaatacttagtatttgaagcaaacactggaactgaagatggctaccaaggcgaagaatctttatttaacaaagcatactatggcaaaagcacatcattcttccgtcaagaaagtcaaaagcttctgcaaagtgataaaaagcgcactgctgaattagctaacggcgctctcggtatgattgagctaaacgatgattacacactgaaaaaagtgatgaaaccgctgattgcatctaacacagtaacagatgaaattgaacgcgcgaacgtctttaaaatgaacggcaaatggtatctgttcactgactcccgcgggtcaaaaatgacgattgacggcattacgtctaacgatatttacatgcttggctatgtttctaattctttaactggcccatacaagccgctgaacaaaactggccttgtgttaaaaatggatcttgatcctaacgatgtaacctttacttactcacacttcgctgtacctcaagcgaaaggaaacaatgtcgtgattacaagctatatgacaaacagaggattctacgcagacaaacaatcaacgtttgcgccaagcttcctgctgaacatcaaaggcaagaaaacatctgttgtcaaagacagcatccttgaacaaggacaattaacagttaacaaataaaaacgcaaaagaaaatgccgatatcctattggcattttcttttatttcttatcaacataaaggtgaatcccatatgaactatataaaagcaggcaaatggctaaccgtattcctaacctttttaggaatattgctgtttatcgacttatttccaaaagaagaacatgaccaaaaaacaaaatcaaaacagaagccggactaccgggctgcatatcattttacgacgccggataaatggaaaaatgaccctcaaaaaccgatctattttgatggcaagtatcattatttctatctatataaccgggattacccaaaaggcaacggcacagaatggcgccatgccgtctcagaggatttggtgcactggaccgatgaaggcgtggcgattccgaaatatacaaacccggacggtgacatttggaccggttccgtcgtggttgataaagagaacacagccggctttgggaaaaatgcgcttgtcgcgattgtgacacagccctcagccaaagacaaaaaacaggaacaatatttgtggtacagcacagataagggaaaatcattcaaattctacagtggcaaccccgttatgcctaatccgggtacagacgatttcagagatccgaaagtcatatgggatgaccaggataacaaatgggtcatggtcatggctgaaggatcaaaaatcggcttttatgaatccgataatcttaaggactggcattacacaagcggattcttcccagaacaggcgggaatggtggaatgtcccgacctctacatgatgcgggcaagcgacggaacgaataagtgggttctcggtgccagcgcgaatggcaaaccgtggggcaaaccaaatacgtacgcctactggaccggaagcttcgacggaaaagaattcaaagcggatcagactgaagcccaatggcttgactatggcttcgactggtatggcggtgtgacgttcgaagacagcaaaagcacagatccattagaaaagcggtatgcgcttgcctggatgaacaattgggattatgccaacaacaccccgacaatgaagaacggctttaacggcacagattctgtcatacgcgaactccggctgaaggagcaggatggaacatacagcctcgtctcacagccgattgaagctttggagcagctgactgtttcaactgacgaaatagaggatcaggatgtgaacggatcaaaaacattgtcgataacaggtgatacgtaccagcttgatacggatctttcttggtcagagctaaagaatgcaggcgtcaggctcagagaatcagaagaccaaaaacgccatattgatgtcggtattttcgctgaaggcggctatgcttatgtcaatagagcagccacaaatcagcctgacaaaagcaatacctatgtcgaaagcaaagctccttatgatgtaaacaaacgtaaggtgcatttgaaaatacttgtcgataaaacaacgatagaagtatttgttggcgacgggaaaaccgttttttcaaatgaagtcttcccaaagcctgaagataaaggaattaccctttattctgacggcggcacagcctccttcaaaaatataacagtgaaacactttgattcgattcatgaataaaaacaggggcagcgcaggctgccctgtttttttattaggagcggtattctctgttacatattgggcattgtaagaaatataaggctggtttcaaaggaggaagcgaatgtctaaacaaggaaattttcaaaaatcaatgtcgctgtttgatctgattttgattgggatgggagccatctttggatcagcgtggctgttcgctgtcagtaatgtcgcttcaaaagcagggccctccggcgctttttcctggatcctcggaggagccattattttgttaatcgggctcgtatatgcggagctcggagccgctctgccccgtaccggaggcatcattcgataccccgtttattcacatggccaccttgtcggctacttaatttcgtttgtcacgattgtcgcttatacaagcttgatttcaattgaagtgacagctgtgcgccagtatgtggcctattggtttcccggcctgaccattaaagggtctgattcgccgaccatttccggctggatcttgcagtttgccctattatgcttgtttttcctgctgaattattggagcgtcaaaaccttcgctaaggcgaatttcatcatatcgatttttaaatatattgtgccgattaccatcattattgtgctgatctttcattttcagccggagaatttatccgttcaaggatttgcaccgtttggatttacaggtattcaggctgcaatctcgacaggcggcgtcatgtttgcgtatctcggcctgcacccgattgtatctgtagcaggtgaagtccaaaatccaaaacgcaatatcccgatcgctttaatcatttgcatcatcgtttcaaccatcatttatactgttttgcaggtcacctttattggtgcaatcccgacagaaacactgaaacatggctggcccgcaattggccgggagttctcattgccgtttaaggatattgcggtcatgctcggattaggctggcttgcaacgcttgtcattttagacgccattctgtctcccggaggaaacgggaatatctttatgaatacgacatcccgccttgtttacgcctgggcgcgtaacggcacattatttggcatattctcaaaggtcaataaagatacggggacaccccgcgcatcgctttggctttcgtttgccctgtccattttctggacacttccctttccttcgtggaatgcgctcgtcaatgtctgttcagtcgcgctcattctttcatatgcgattgcacccatttcttcagctgcgctgagggtcaacgcgaaggacttaaacaggccgttttatttaaagggaatgagcattatcgggccgctttcctttatatttacagcgtttatcgtgtactggtcaggatggaaaacagtctcctggctgctcggttcacaactcgtgatgtttttgatctatctctgtttcagcaaatatacgcctaaagaagatgtcagcctcgctcagcagctgaaatcagcctggtggcttatcgggttttatattatgatgctgatcttttcctacatcggttctttcggacatggtttagggattatcagcaatcccgtcgacctcattttagtcgcgatcggctcacttgcgatttattactgggcaaagtataccgggctcccaaaagccgccattgattacgataaataaagaagcaagaggttttcttgcttctttattctttacaaacatacatacacgcgataaaatgaatgagagtcagtcattatcggaggtgttcctcatgccaaaacaaacatcgggcaaatacgaaaaaattctgcaggctgccatagaagtcatttctgaaaaaggcctcgacaaagcttctatttctgatattgtcaaaaaggccggcactgcccaaggaacattctatttgtatttttcatctaaaaatgccctcataccggccattgcagaaaatctcctcacccatacacttgatcaaatcaaaggtaggctgcatggggacgaggatttttggaccgttttagatatattaattgatgagacatttctcattacagaacgccataaggatattattgtcctctgttattccgggcttgcgatcgaccactccatggaaaaatgggagacgatctatcagccttattattcctggcttgaaaaaatcatcaacaaggccattgcaaaccacgaggtaacggaaggaatcaattcaaaatggacggccagaacgattatcaacttggtcgagaatactgcggaacgattctatatcggatttgaacaagatgaaaatgttgaagtgtataaaaaggaaattttcactttcttaaaacggagcttaggtactgcttaaaaaatgactgggtaacaccgctcattttttaatgccctaaaaatgactgacgttcattcataaaatagagaggtgtttcatttgaattgggttcttgtttttattgcagggcttttagaagttgtttgggcctcttccctcaaacatgccgattcgcttttggattggatcatcatttttatcttaatcgcggtcagctttatcctgttgatccgctcttatcaaaaaatcccgatggccgcggcgtacactgtgtttgtgggaatcggaaccgtcggaacatatctgactggaattgttctgggcgaatccttctcagcagcccaaatgttctttttagctttattgctggctggcattttaggaatgaaattatttacgaaagaaagcaaatctcagccgggaggtgaacaataatggcatggtttttattagtgattgccggcatagaagaaattatagctgccattgccatgaaatatatagacggaacaagaaaaaaatggccaatcattgtgatgactgttggattcggcttatccttttactgcctttcccaagcgatgatcgtcctgcctgccggagtcgcatatgccgtctggactggcattggaagcattggtgtttcggcggtcgggctcatctggtttaaggagcggtttcagctttcacaggtgatttcactttgccttatcctagccggcgtcatcggcctgcgtcttacgtcatcttcataaaatcaaggcatatacagctgtatatgcctttgccattaagcttcgtgatgtttttgaagatgaagcggcggtgggatgagccagcctttgttttttagcagccttaagtattttgcgccggttgccgctttcgacatatgaaattgcccaaacatcatggcaatatcctcacgaatcgattgccccatcattttgctgcatgtcaccagacctgcagcattttctgctgccgcggaggccgccacatccggatcgagaaaccgtgcgccaggcggaatgtcgttaagatctgctgtcggcggttcaggagaagccggcggcagcgccaccccgttttctttcaggatcgtgctgacctgtttgatttcatcttggcatttctcaatagactcacgaagcagtttcttcaggtcgtcatcaccgacatgattcaatagcatttggtaattgccgaccattttattgcccgccatcacataactccacaagccgaatacctcaccgtaatgcatcggttcatcctgcggatttccgcttaaaatacccatgttcatcctcctcccatattcaatattgcacatttcataacgtgcccaagcggaggaacatttatgtttcagcggaaaagatttatgaaatgaaacaaaacaaaaaagacaagagtggcaagttgccaaaccattgtctttcctgttgtttgattggacgcactgaagggattcgcaccccgacagacaagataccggaaaccattcaagtgctttttaatatgagtcattgattctgtctttaataaactttaacgagatggcgggatgctttgcggaaaacgaaatacattttcggggtcatatttcgcctttatttctcgaagccgcgcaaagtttgcgccataatattcttttccgaagttttcaatgttttgatctggaacattaacatatgaacctgctacatatggttgcatcagctgacgcactctttcaactgatgcaagatttgaatcttcttgtgatttatttttccaactagccgtccattccgtataaaatattggatggcgccaaaaaaaggcagtttcgtctttagggactctgcttatagcaccaccccaattgataaaaaagaaattggcatctgttccagtagcgtcttccaaaaattttctcatgattgaaatgggttcgtcagaccaaaaatcatgaccccaagccgaggagaatttaacactctgatcatttctgccagggatgggttcgtcagggtctaagaaatctatagcatctggatagtataatgttttgatatctgcttctgttggagttcccgcatgtaataaaggttttaataatcgaatcaattcagttttcgaaccgaggaaaattccttctgcatgacacaaaccatttattttgctgtaaatttcaaggtagcatcctaatcgttcatctacaaacggagcccatttctgccaagctttaaataccgtttctaattgttcccacggccagataatattgaagacggttgcagttttaggggcacgatgaactttgaatgtatattgggtattatatccaaagttacctcctcctccgcctctagaagcccatagcaaatcctcattgtgagattgatctgcatgaataatccttccttttgcatctaccgttttcagcgcgagaaggttatcacttataaggccaatcgatcgtgagagtacaccaaatccgccgcccatcgtaattcccccgattccaactgttgggctatctccaaacggagccataaaaccgtctcgagctaatccctttacaagcgggccaacgggaataccagtttgaacggttgcaatcgcgttttcttcatctaagaaaactttattcatgtcactcacatcaataacaattcctccacttactactgaaaggttcttatctaaagcatggcgaccgcttctgacacgtaagggcactttattctcacgagcccatttaatggcattacttacatcgtatgaattttgcgcaaaaacaaagacaagaggatagacatccacataagggttccaattcttaatagcctctgtatagccggggtctcctttgaaaattacacgccctgtcaactgtgttgatcccatatattatttcactcctaaagaaattcgattcagatactaaaatatgcaggagctggataatcgcatagacaaatgatctacgaactataaatataatacgctaaggcctttttcgtcggtaaggtctgctgagaaacatttttcaaacaattttgagcaaacttcctgtccaatcctccaacaagcgttttttcttatcgtttttaggagcagtgtccagtttttttcggagtgaatattcgtttaggccaaaagaaaagagagatgaagaagtgtttagtaccagaggtatacatccatacaacagactctagatcatcatatactgaatgtatgtagaaaggagacatcagctttggcaaaatatcggattatgacctttgacggcggcggtaccttaggtgctttaagtttgcaactgttaaacagattggctaggcaaaacccgaagttaattagtcgaacccatgtattttcgggaaattcaatcggttcatttactgcccttgcattagcaagcggaagatctccgagggaaacacttcagtattttgaggatgaaatcctacccgcattcagcatttcccggccaggcggacctgttttcaaccaacaattaccctattccggttttattaaagcggtaagaaattttttcccagcagatcttcaacttatagatttaagaaaacgaattgttgtcccatcattcaaattatactctcaaaaactggatcgttggactcctgtcttatttcacaattttcccggctctccctatttaaatgagaaagtaagtgatgtcatactgcggagcagcggtgctcccgcgacgcaacgggcctatcaaaactatgtggatgggtatgtagtagcaacgaaccctagtacagccagtatcgcgtttgcagttggtaaagccaatgtgccattggatcaaattgcggtattgtccatcggaacaggtgaagccccgacccggttaagaagagatacgaagggatggggaatggtaagtgcagataacatccgccccgaaaatctgaagaaccttcctccaaattggggagttcttttggacaggtcgcctaatgaacctttactgccatttcttcagatgattgctggcggtaatgggtactatgaatccatggtcagtgcgaatcttctgggagatcgttttttccggttagatccacggattccgaacttctccaaaacggaccctgccgtcgttcccgctgtcattgaaattgcgaacaaaaccaacttacagcctgcgattcaatttatagagaagaactgggggagtaaataaatttttattttaaaactattctcacttatccaattttgtccgagagaagattctcaaaataaatacaggcaatgggtagaaccggatttttttaaaggtttgttaatcacaagctaataagatgaatgaaaaaatcaattcatacttcttcttttgaaagtgagggttcaaactaaagaatgtaattgaaatgttactctaaggtatgcaattccctttttcacacaaaaaagacaagagcggcaaatcgccaaacccttgtctttcctgttgttctattggacgcgctcggagggattcgaacccccgacagacgtggtaccggaaaccaccgctctatccaactgagctacgagcgcagaatgactgcgttatgagaacgtcagcacaactaattatacgataattccattcaaataacaaccctctatttcgagaggccgttttttaaatagacaaagcatcttaattggcaatctgacatacgatggtttgaacccctgtatttttggggaaaatgggaaaaagagacgactttgcatatcaggccagctttttgtttgacctttattgaccaaaaatgtatcatgtaactacatacttacctaaaaggtgaaggaggagcattatgaatttaatacctacagtcattgaacaaacgaaccgcggggaaagagcgtatgacatttattctcgtctattaaaggatcgtatcatcatgcttggatctgcgattgatgacaacgttgcgaactccatcgtgtcacagcttttattcttagcagcagaagaccctgaaaaagaaatttctctttacatcaacagcccgggcggctctattacagccggtatggcgatctatgataccatgcagtttattaagccgaaggtatctacaatttgtatcggtatggctgcgtcaatgggcgcgttcctgcttgcagccggcgaaaaaggcaaacgctatgcgcttccaaacagtgaagtcatgattcaccagcctcttggcggtgcgcaaggtcaggcgacagaaattgaaattgccgcgaaacgcattctcttgcttcgcgacaaattaaacaaagtccttgctgaacgtactggccagccgcttgaagtgatcgaacgcgacacagaccgtgataacttcaagtctgctgaagaagcgcttgaatacggcctgattgacaaaattttgactcacacagaagacaaaaagtaataacacaacctgcaagagctgcgtctcttgcaggtttttttcatttcaaggaattgactcccttaaacactttttgttctatactgctcccatccctcatgtaacagctcaagcgtcaaatcattcgtctgcctcacaaccagatcagcaccaagcatcggctgtccttgaccgacaccaaccgcaaacatccccgcagatttgattgcagaaatgcctgcttctgcgtcttctattgccgcgcaatcagcaggggaaacatcgagcatcgctgcagctgttaaaaagatgtcaggatcaggcttccccttcgcaagagtcgtcggatcaacaatggcatcaaaatcatcgataattgccaaacgtcttaaaatcttaggagcattgcgacttgaagatgctaacccgatttttatattttcgtttttcaattgacatagaagcctgccaatccccggtaaaagatcttccggcgtcaatttgctgatcagcatttgataatcgcgatttttccgatgcataagctcttgtttctccgcatttgtatactttgtttccgcaccgccaaagatcaatatgctttcaagtgactcttctctgctgattccttttagcctttcattcatgtctctgtcaaaagggatattaatttgttctgcgatgtgcttccaagcgagaaaatgatattcagcagtatctgttatcactccgtctaaatcaaaaatgaccgctttcatatactaatgcccatcacagcttcataaggtttgaggctaatactctttaagtccgcccgctcctgcggatagtttgaaatcagcactttccaacgctcatgaatcagttctggaggcgcttcgaacagagccttttcttccgataaattcacaacgacaagaagcttttccccttgatattctcgaaggtaagaaaagacctgcggatcattctcctgcaaaagctgataatcgccatatatcataatcttatattgctttcgtaattgaatgagcttctgatagtaaaagaaaatcgaatcttgatctttcaaggactctttcacattgatatcttggtagcgggaatttaccggtatccacgggtttccggttgtgaatcccgcatgttttccggcatcccactgcataggtgttctcgcatgatcccttccttttatcatcacggctttgagaaactctttttctgacatcgttttgttttcgacgactagttcacgatatgcattctttatttcaagatcatcatacatctccagcggcatatcgctgttgaccatgccgatttcttctccctggtaaataaacggcgttcctttcatgccgtgcagaaccgttgcaaatgccttcgcacattctttacgcagcttcccatcattgccccagcgggaaataaccctcggctggtcatggttctcaaaatacagggtattccagccgacattcattaacccggtctgccaccttgtcatcgtcttttttaaagcaatcaaatcaaacggcttgatctgccatttcccatttggcgagttttgttctgtatcaatatccatatgttcaaatgtaaagatcatattcagctcttgcctgcttgcatctgtgtactttttcgcctcttcaatatcagagccgtttgcctctccgactgtcatgcagtcgtaatgagaaagcacttccctgttcatctcttgaataaactcatgaagacgggggccgttagagtgataacggccgacaatatagctgcggctgtgatccgtttcgtagtccggaaaatcggtgtatttagaaatagagccgatcacatccatccgccagccgtcaacgcctctatccatccagaatctcattacatcataaacttcccggcgaacggcttcgttttcccaatttaaatcaggctgttttttcgaaaagtagtgcaaataatactgctctgttccttcatcgtatgtccacgctgagcctgaaaagatcgatccccaattattcggctctgagccgtccggtttaggatctttccaaaaataataatcccggtaaggattgtccttcgacttgcggctttcagcaaaccaagcatgctcatctgatgtgtggttcacgaccaaatccatgacgattttcattccgcgtttatgggcttcatcaatcagctgaaacatatcttcatttgtcccaaacttttcgtacatgtttttgtaatcgctgatatcatatccgttgtcatcctgcggggaatcaaataccggggagagccagatgacatccgccccgagatttttgatgtaatccagcttttgaatcacaccttgcaaatccccgaatccatctccattggcatcataaaaactgcgcgggtaaatttgataaacgacagcttctttccaccattcactcattaggcgttctcctttcacatcgtccctgtaggacaactggttcctcataaacgttcatgtgcagcggctcgccttttacaagctcaaaaataacgcgcttttcgtcaaccgtcacattgattaatcgatttcgataattgatgttgaatgaatattcgtcccattctttcggcaaaaacggagcaaatgacagcgtctcattcgcggtgcgcatgcctgcaaagccatgaacgattgccagccagctacccgtcattgaagtaatatgcaagccttcttccgtatcatgattgtaattatcaagatcaagccttgctgtgcgcttatataattcgagcgctttcttttccagcttgagttcggctgcgagaatcgcatggacagagggcgataggcttgattcatgaacagtcatcggctcataaaattcaaagtttcgccgtttttcttccattgtaaaacggtcattaaaaagataaatgccttggagaacatctgcctgcttaataaaattggagcggagaatcttgtcccatgaccaattctggtaaagaggccgttccgctggatctaattcgtcaactgcttgcaggtctttatccaagaacgtgtcatgctgaacgaaaatttgcagttcttcactatacggatagtacatgtgctggatgatttctctccagactttcaattcttcttcctgtacatccagaaggcggcgtttctccgctgagatactttcgagactttgtagagtatactccaacgtccaagccgcaatgacattcgtataccaattgttgttaacgttgttttcgtattcattcggccctgtgacgccatggatcatatacttattttttcgtttcgagaagtgaacacggtcggcccaaaatctgctgactgccacaagtacgtctatcccgtattcttccatatagttacggtcgcctgtataattgatataattgtagatcgcataacagatcgcgccattgcggtgaatttcttcaaaggtgatttcccattcgttgtggcattcatcaccggtgaacgtcaccatcggataaagtgcccccttcatccccaattttgccgcgtttcgttcggcagcctccaactgatgatagcgatacaaaagcaggtttttcgtcacctccggctcggctgtcgccaaatacatcggaacggcgtacgcctcagtatcccaatatgcggcacctccatatttctcgccagtaaatcctttcggcccgatattcaaacgggcatcgcccccgtaatatgtcgagaataactgaaagatattgtagcggattccttgttgaagctcctcatctcctttaatctcaatgtccgcttttgcccatctttccttccatcgatcagtgtgcctccgttttgcatcttcatagccgttctctaccacatccgccaaaagctccttggctttcgataaaagctcttcctcccgaaaatcacgggaagtcgtgacaatcacaaactttttcaatgatgccttcgtttggtagctgtagcgattctcgacatacatttcattcgttttaaagcttttattgacaaaaccctccgtctcatttgccattgcggctaaaaccgtgaagcgcggtgttccaaatggattttcgatcgtttttgccgctaaatggccgctgtgagaatcagcacctttcgcttcctcctgccaaaactgttcttggtagttagaatcttcatttgccacatttccatccaggtaaggaacaagcgtaatgacagcatctcccgtcaggcactccgcttcataatgaatcgcacagagttcttttacagcaaggctaagaaaccgctctgacctgattctgacggatttatcctgaatgcggacaacagcgcttcgccgcagaatcccctctttcatattgagttctacctcaaatgattcgattgggttttgatggagatcgattttttcaccgtcaacatataggcctatgcccataaagttcatcgcattgatcacttttccgaaatattctggatacccgtttttccaccagcctactcgcgttttgtcggggaaccacacgcctgcaatatatgtgccttggtgactgtcgcctgaatagccttcttcaaaattccctctgacccccatatagccattggcaagagacgtcaggctttccagcagccgtgtatgctccttattaaatgtatttgttttgattttccattcatcaatctcaaataaccgctgatttatcatcatttcctcccgaatgtaagtttccattatcacggcgggttttggtcaaatatctaaatgcaaaagaaatcatcaaagtaacgccacacgaatggatcatcaatacagtaatcaaatcaaaatgaaccatgccgatagcagctgccgcaaatgccggcagtgccgaggcgcaaatcgccgtagatactgcttccttgaatgacgcaatagagatcatgtttgatatttttgtgatccagaggccacctgcaagaacaaacgttaacaaaagctggatcataaagattaccgcatatgccagcatcatgatcatcggcttatactgtgccaaccataatgtatcgatcaaaacctctacatcatggacgtttggtttctcgagcttaacgtccattttcgcatagccaacagaaaaccccgtttcgttttgatcggtgatcaccagttgatcaggttgaaatatgatagcgttttcaaatccagttactttcaatcgcccattttcaccgcttgtctcatattcatgcttcatatcgactgccatcacattctgcccatcttcaatcctctcagaactcttcccgcctgttagttttccgttcctgatttgaaaaccctgtaattgatcagcaaattgatcattaaccccttgaatcgctgacggcatgaaagatgcaacgctgaagcgatccattttcacaaacgaaaccgctaacggcgtcattaagcaggccgttaaaaacagaaagagaaaagagagctgcagccagctgaaagtattcccgtaacggcaaacacctgatggggatgcacccgccttcaggcagcggatgataaagcttttattctccagattcttcattggcattacccctttgttccgccggctgtcaatccggacacaaagttcttttggagaaaaaagaataagacgcatatcggcagcgcggcaagtatggcaccggctgcaaatagagctactttttgctgctgcggattagaaataaaggattgtaatcctacagcgatggtcagcctttccggtgagcgaagcagaaatttcgccagcaaatagtcgccaaacggtgccataaacgcccaaagcgcttgtaccgcgagcattggcttaacaagcggcagaacaattgaagcgaaaatcctcagatgtcccgctccgtcaattcgcgcggcttcatcaatttctctcggcacagtatcaaaataacctttcatcagccacgtgttcatcggaattccgccgccgatatagatcgctgttaaaaaccagtattgatcgagtgcgcctattagcatcgccaagacataaaaagcagtcagcgccgccattgtcggcaccatttgaatgattaaaaagaatatcaggctcttttttctgcctgcaaaccgatagcggctgtacgagtacccggcaagtgtcacaatcgtaacctgcaaaaccatgaccgatagcgcgatgacaagtgtattgctgtaccaatgaagataaagcgtttcttcaaatagccgcttaaaatgatccaacgtccaaggacccgaaaaatcgagctgaaaagccgccgaattccccacacggaaggctgatgatgccgtaatcagcaacggatatataatgacaatacttaaaagcgtcaaaaagaaatacgtacagattttattaagcattctggcagtgctcgcgttcacctacataacctcctcattgccaaaagcattcgattttttgaaagcaatcagtgaaattccaatgacaatgaaagaaattaacagtgtcacagccgccgcaacggaatattggggtgatgtgcctgttgtcagtttataaatccacgaaattaagatatcggtcgatccggccccggctcccacactgcctggccctccctcattaaataaatagatgatcgagaaattattgaaattaaacgtatactgagtaatcatcacgggtgctgtggcaaataaaatcatcgggaatgtaatatgccgaaaacgctgaataaaagtggccccgtcaatctttgccgcttcatacaattcacctggaatcgcctgaagcactcccgttaccatgacataaatatatggaaagccgagccacgtctgaatcataatgagggctgtctttgtccagaaaggatcagtcttccacgcgatcgcaggcagctcaacaaacggcaggtgattgaatagtggaatcacctgtgcattcaccgctcctatgctgtcgttaaacatgttggaaaaactcatgattgtaataaacgccggaacagcccatggaaataagaaaatcattcgaaatatccgcttgccttttataaaatcctgattgacgaaaagggccgtcacaatacctaaaatgatttgcagcgttgttgcacagattgtccagataaccgtccagcccagtacattcacaaatgtttcacgataggagccaaggaaaaaaatattcaagaaatttttaaacccgacccagtcaatcagacgattaggcggaatatgataaaaatcatagtttgtacatgcaacaaacagagtcaccaaaaccggaaagataatcacaaacaccatcatgatatatgccggcagtgtaaatagatatggaaaccctttatcgcccgcatgacagatcatatccttggctattgtattgacttccaaacccgccgctttcatagcggcggtcttacgtgaatcatgaatattaaagatatagaacatgaggaaaatcattgtcacgatcaattgcagcgtgccttcaatcagcataaacagcgagtggtcttcaccgggaacacttcccaatgtcatcaatccggttagcgcctgtataccgaaaacgcataattcaaaagcaaacaagcctgtaatggcaagaaataagagcccctttgacaattgctgattcgcaatctgcccaagtcctggaatgatcgataaaagccctgcctttcgtttttgctttgcaagtgtgtgatgtttattcattttttccgccctctattcttccggacgctatcccgccgttttatttcacatacttttctttaatattttcctttatgacgtttacagcatcattcgctgatgtttgtgtcgatttttttcctgaagctgcatcaaaaattaaactttccgctcctgtccatacttcagccatttccggaatatttggagtcggcgtcgctgtttcatattgtttaatcacagctgacgtcagttcattcttttgctcatcggctttcctccttgcggcagtgttggccggaacttcgtttgtattctgataaaaagcgtaagcattggcatcatttgcagcatactcaagccatttttcagccagctcgggctcttttgtatattttgaagctacccagcccttcccgcccgcaaaaggggcatattcttctccattgggcaatgtcggaatgggagccgctccgtagttcaatttagcctctttatagttggcagctgaccaaggaccgccaatgatcgcagccgctttgccttctaaaaacatctgctgaataaagtcgtctgcgcttgaattgtcttgcattcctttcggccaatatgtttcaaaccatttctccgcatatttcaccgcttctacagcccctttattgttcaggccgatgtccccggaatctgtgccgttttttccaaacacatatccgccgtaaccagccaataagccgtacgacatataaaagtcagtccattttgctaaaaatccggttgattttcctttttccgaagcaaacgcgaatcgaggatcttccgttaacttttcaaggtctttaaatgtttttggcgctgtttttaaaagatctttgttgtaatacaaaataagtgtctcaatgactagcggcattccgtacactttgccgtcaactgtcacctgctgcatttctttatcaccaaagctttttgtgttagatggcttaatatcaagtaaatgtccttgttgtcccaaaccgccgatccggtcatatgcagcaagcataacatcaggcgcattacccgccgggccatcaagaggaagcgcttctaactgttcgaacatttgcttttcaacaatttttactgtgacatcattctctttttcgaactttgtttttatgctttcaatgtattctttatacgtttcttcgacggacacagtcagcacctttttgccatcagcgcttgctggattttttgaacttgagcaggcggcaaggccgattgccaggaatgatgccgccaatatggcgaaccccttttttaaaagaaccatctcttttcccccttctatttacgaaactataacaattgtattgtcctatagaaagcggttacaacaacttttgatttgttaccgataacagaatgttatacaggggcggcagcactcaaaatcaaaaattctcccggctgaacggtaatgacatcgtgatgctgaagcggctgctctgtccatgcatcacagatcctcttattcctttcaatattcaaatccagtaaactgacatgttgaaccgcattcccttgattaaagaaataaatcagtattttttcatcaagagtccgtgaaaagctaataaaatcgttttggtcatccagcagattccactcaagatgtccttcagtcaataaagtgttttcctgcttgcgtaaagcaattaaccgtttcataaattgcagcatgtcttggttttgcttctctttttcccaaaccatacattttcggcataatggatcattttcgccgttcagcccgatttccgttccgtaataaatgcatggtgagcctgtctgggcaaacataaaggccagcaacgcgcgtgctttcttctcatcattgcggcatctggtcaaaaggcgctttgtatcatggctatccagtaaattaaacatcacctcattggcctgcttcattccattcatcaaatgtgcattgacacggtgagccatacgtgaagctgagatcgtctggtcagcaaagtattcaatcataggctctgtaaaagggtaattcatcgccgcatgaaattcatcccctctaagccagggttcggcagaatgccagatctcacctaaaatataaacatcaggcttttcagtagatacagcctgcctaaatgtcttccaaaaagcgtgatccacttcatttgcgacatccaaacgccagccgtcaatgtcaaattcgcgaatccagtacaaagcaatatcaagcaaatatttctgcacctcgggattagccgtgtttagcttcggcatatcagctgtaaaagcaaacctgtcataattgtcgtctgtgacgggaaaagagtgaatatggaaccagtctttatagcgggattgatctccgtttttgacgacatcctgccattgcggagacgcgcttcctatatggttaaaaaccgcatcaagcataattctcatcccccgctgatgcagctggctgaccaatgtacgaaaaagctcaggatccccgaaatgcggatcaatagaaaagtaatccagcgtgtcgtatttatgattagaaggcgcggaaaagatcggtgtcagataaatgccgttcacccctaaatcctctaaataatcaagcttgtcaacaattccttgtaaatcccctccaaaaaaatcattgacgcccgggtccttgctcccccacggcaatgcattcttcggtgacaagtcttctcttccatttgcaaaacgctccggaaaaatttgataccaaaccgttgacttgacccattcaggcgcttgaaatgtatcagcctcgtgaacaaacggaaatttaaagtaataatgaatcgtttccagtgttttttcgttataagggcatacacccgaacttccgaaaaagatgtcttcatgatcgtctgttacaacaaacgcatattgtaaacgcctaaatggcggcaccacttcagcaaaccaatagtcatgcatttctgtagcagcaattttcctcatcggctgctcgtttgccgaccacttgccgtcgttgtactcatagggatcaccccaaatgaatcgaatgtgatctgcatcacctttttttgtccgaatcttgatatgcacagcccgcccatcataagaataagcatctgtgctgaatggctggtggtgaatcgctgcatattccatcatgtttccccctttgatttccgttttattgaagccggctcatagtttgaaagtatcatgatgaaattgtgggaacaatccttttcaccctgttaccgataacagaataaggcgcttacagcgttgattctcgtacaattaactctggttcaaaaaatagacttccttgtgcagcaccgtcttcattcatttttttcagcaacattttcgcacaggcttcccccatttcaacaacaggctgtctgaccgtagtcaagcgcggcgaggagatgcgatcaagaaacacaccgtcattcccggtaaccgcaacgtcttccggaattctctttccaagggattgcgccgcacgaatgacgccgagcgcgattcgatcagatgcgcagacaaatgcggcttgattgtccatggatttcagcagttctcttgcaaggccctcacttttcttagaactgttgtcgatccgaaacatattcgattttttaaagcttttattcatcgcccgtatatacccctgttctcttgcacgttcgaaaggctcatctaaatcaatgccaaaaaagacaacttcccgctcccccagccccataacatggcgggttgccataaaagtgcctttctcgttattcacatcgataaagtcatagcccatttcattttgtccaaatacgacgagcggcttctcaaacgcttttattacaccttcaaaatcgttctttctcaagccggtggcaataatgccgtcacattggccaatattaagagaatttcttgtcacaagctggagagcatagtgattgcgatccagctccctgctgattcctgtcagcaggttcatgtaatatggttctgtcgtatccatttcctcaagtatcaatagtttcacaacctgtgttctgttttgcacgagcgctctcgccgcataattagggatgtaattcagctctttcatcgcagaatgaacaagctttttcaattcatctgtcaccgtctcagggtgattgatcactcgtgataccgtcattttcgaaacatttgctttttttgccacatctgacaatgttgccattttcatcccctccttatctgtgcttattatccaaactagtgataaagtcctctattactgttaaatatacgatgcaggcaaaagagaaataaaaaagagatttcccttaaggaaacctcactttgttaaaaactctcgatttttcatggattcatacgctaggtggcagactcattctctccacttccatgagaaagtctcttttttaaatttctgtccactttttttctaaaatcggataagaataattttgcatttgctcaattaactcatccggccgtgacgagctgtgaatcagttttaggtgcgattcgttagaaaacccttcttgaatgctgtatttcaccattttcatcattggttcaaaatatccgtttacattgtacagtccgattggcttttggtggatgccgatctgtgcccagcacagcacttcaaataattcttcatatgtaccaaagccgcccggcatcgagataaagccgtccgccagctcgctcattttagcctttcgttcatgcatcccgtttacttcaatcagctcagtcagattctgatggacaacctccccgctgaacaaaccgctcggcatgaccccgattgcagttccgccgttttccataatcgcgtcggcaatcgtgcccatcaagccgacgcgggagcccccatagacaaggccgattccctgctcagccatatacacgccaagctctgccgcttttcttttatacgcttcatttcccccagggtttgatcccgcaaatacacaaatggttttcatcttgtcatctccgcatctatatatcgtgttaaacattcaaaaacacactatatattgtcccatcttcatgtgataatatcaatatgaaatacataaagaatgcaggagtgatgaggttgcagctggctgatgcagaaaaatggatgaaagagttttacgaaaaaagaggctggacagaatacggaccttttattcgcgtcggctttttaatggaggaagccggagaattggcccgggctgtcagggcgtatgaaatcggcagagaccggccggatgagaaagaatcgtcacgcgctgagcaaaaacaagaattgattgaagaaatgggagatgtcatcggaaatatcgccattcttgctgatatgtatggtgtctctttagaagacgtcatgaaggcccaccaagaaaaactgacaaaacgatttgagcatgcataaaaaagcggccgcgatggccgctttttttaacctgtgatttcatcatggtgatcaaagaaatgctgctttcctattttgtgaaaaaggcctgttttatgcagcagctcctttggctgcgattgcaatcctacaatcatcagctttccattgtggcgtttaatccgattcataatgttcccaagcaccgcttcagctgacgtatccatatagtgcaccttattcatgagcagaatgagggttttcggttttttctgtacatgctccagcaatgacgattcaagggaatcaattgatccgaaaaacaacggtccttctatggcatacatgctgacagatggatcttctctcttcgccagaacaggatgcgattcctgattgtggatgcgggtcgcttcgctcattcttctgataaagaacacaaatgcaagcagcaatccggttgccacaccgatgattaagtcaaacagaaccgtaagggcgaaggtcgccgccaaaataaaggaatcagcgtttttcagtctcagcatgtttgcgacttccttgcgctcactcatattccatgcgaccaccatgagaatcggtgccatactggcgagcggcacatgggacgcataaggcgcaaatacaagcaggacaaggagaacgactacgccgtgaacgacgccggaaactggggaaaccgctccgttttttatattggtcgccgttctcgcaatcgctcctgtagccgggattccgccaaacaggggcgctgccatattcgcaattccctggccgacaagctccttattgctgtcatgctttgagcccttcatgttatcagcgaccattgcggacaaaatcgactcaagtcctccaagaagcgcgatgacaagcgcagccggaaacagcataaccattttatccaaagtaagctcaggaaactgaaattcaggcaaatggcgggggatttctccataagttgacccaatcgttgccatgcggtcagggaaaaagacaaccgcgaccactgtggaaataagaagcgccaacaaagcgcccggcactttaggcatcaccttggcggatacaagcaaaatgacgagcccgatcacagctgtcaaaatggcatatacgttaaaggtgccgagctgctgtacaatttcaaacatgttgtggtgaaagttctcatgtttttcaacatttctcaatccgagaaaattagcgatttgttccgtaaagatcagcacggcaattccggctgtaaaaccgacgataacgggtttaggcacgaatttcattatttttccgagcttaaacagcccaaacagcaccagcattacccctgccataaaccctgcgatcagcagattctctaatccgtactgcatgataatgccgaacagtatcgggacaaaggcgcctgtcggaccgccaatttgatatttagatcccccgaacaaagagatacaaatccccgctataacaacagtgtacagcccgtattcgggctcgactcccgaggcaatggcaaacgccattcctaaaggaattgccacgacacctactacgatacctgcaattaagtctttctgaaatttctgtaaattgtatcccttgaatctccctgagaatcgcatattttgttataacctcccttatgagtgattgtttattagctcagtttcataaccgttaatgaccacatcaagttttcctgtttcagggtgaatgacaagcccgtgaaccggcacttttttcggaagcagcggatggttcttaatcatgttcacactgtgggaaacgctttcttccacgctgtgaaaaccagtcagccacgttttcaaatcgagtccggcactcgtcagcaaattcaggcagctatcctccaccccgcgttcctttgctttctcaagaatcgaggacgcattcagccctgacattccgcattcatgatggccgacaatgcatacctcttcagcctgcaattcataaatcgcgaccagtatgcttcgcatcacgcttccaaatgggtgagaaacgatggctcccgcgttttttacaattttagcatcaccgtttttaagccccattgcttgcggaagaagttctgtaagccttgtatccatacaggtgacaatgacgagctttttcgaaggaaactttgtcgttttgtacggttcatacttcttctcactgacaaaccgctgattgtgttccaaaattgatgttaaagaaaccatttgattcatctcccatccatatgattttgcaagccttcttacccagcttacagtaaggaattatagcataggaataagccaagaaaaggctttcaaaaaaagacactataattggactgtagaatcaaaacataaacatttatatctttcaaagataataaaatttatatttaatgaatcctataatccggctgcagctcgcatattgatgatttgtctgacaaaaaatatgggtgaattctgataattaaaaaacttttttaagcagatatagctgttcgatcttcattttaagttcaaaagaaccagaaactaaaaaaacgcagctatatttttaacacctatttattttcgatataatgaaatagacaacagccataaagggggagccttgttgaaaccatttgtatttatcacaaaaccgattcctgaagagattgaagcattcatcggtgaacattgccgttatgaagtatggcaggaggatacgcttccgagtgacgtgctatttgaaaaattaaaagaagcggagggacttttaacatcagggacgtccgggccgtcaatcaatcgtgagttgctggaacacgcgcctaagctcaaagtggtcagcaaccaatcagtaggctacgataacttcgatatagaagcaatgaaagaaagaggagtcgtcgggactcatacaccttatacactggatgacacagttgcagatctggctttttcactgattctgtcttccgccagacgtgttgccgaactggaccgttttgtcagagcaggaaaatggggaaccgtggaagaggaagcgcttttcggaattgatgttcatcatcaaacgttaggcattatcggcatgggcagaattggagaacaagcagcgagacgcgccaaatttggttttgatatggaagtgctttatcataaccgacatcgcaaacaagaaacagaagacagcatcggcgttaagtatgcagagcttgatacattgctggagcaatctgattttattcttctcattacgccgctgactgatgaaacctatcacatgataggagaacgcgaatttaagttgatgaaggattcagcaattttcgtcaatatttcccggggaaagacagttgatgaaaaagcactgattcgcgctcttcaggaaggctggatcaggggagccggcttagatgtatacgaaaaagagcctgtcacccaagataatccgctcctgcagctggataatgtcacgctgcttcctcatatcggttcagcaacagctaaagtgcgcttcaacatgtgcaaacaggccgccgaaaatatgctcgcagcgatccaagggcaaacaccgaaaaatcttacaagagaatttcaataaatcaaaaatccggtctgataacagaccggatttcatattacatacgctgaagaacagcacgcttataaatatgacgggtgacgatataataaagagcctggaatacaaaataaatgaagatgacaattacggcctcaagaaataaattggaattcagcatattacttaacgctgcatacgcaaagcccgcgtgaatcgtacctgcgataaatgggatgaagaataaaaatcctatttgctttccaaggatcgagtgaatctctttgtccgtaacccctatcctctttaacgctaacacctgcactctcgtatcttctatttccgtaaacatccgcaaatacagcatgcttccttgcacgataaaaaacagcacgctgacaaacagaccaataaacagcattaatgcaactccctgcttcacaatttgataactaggagcacgtgtttgaaaatcagatgtatgttctttcggcaccatgttttcaagcttttcagagacatccaccgtctcctgccaatgctcaagctcataacctaccattctcatctgttccttcagcggcacatcctgtgacagactgtcaaagctcttttcgctgacaaccaataaacggctgactccatcgacagacatcaatatccctttgttttgctgctttttcatgacataggaaagggtttttcctgacttcatatgaaatgctgctgtttccccttctccaaatgtgtctttcaccatcatttgaaaagaaacattaataaatgcttcattttcttgtaaatgaataactgggaaccctttttcctttgcgacttgattatagactttttctgaaatcagcaaagcttcagcttccatcttcttatttccatacggcaagtctgactgaaaagtgacaggaatccctgtggcatccaccttatacttgataacagcatgagcttttttcaatgtattctcagctgtctcaggcttcatgacctgaaagcgggaagcatccttttccacccaggaaacagactgaggaatgctttgctcctcctgcctttgtaaatcggaataaaacatatagatgacacctgtagctgttagtatgaccgctgtaatgacagaggttaaaaacagcatgcgtgcatgatccttcagcctgaatatcatgttggaacgcacaatgatattcgtgcctttgtagaagctgtgtttctttcggtacagcatgcggaaaaacgccacactgctttgtgtaaaaaagaaatacgtgccaactaacactaaaatcaaaattggaaatacccgaaacatcatgtcaatggcattggctgttgcagatagataataaccgctgccaagacatagcaaagacaatacagtgagccatttcgaataaaccggcaaacttttcggctttttggccgatttaatcagttcaatgatttccagcttccgaatccgtcccagtgataaaatgagcagcgtctgaaacaggatgagaaagccggcaattgtcatcacaaacgctttcggcacaatggcaaacgaaatcggcaccttcacgctgagcatccatgtcataatcataaaaaacagttttgaaaataacaggcctgctccaatgccggccgcaatcgccgcaagagaaataagtgactgctcataataaatcatcttgcgaagctgctgctttgatgtgccaaacagtgtcagcagcccaaactctttctttcttgcctgcaaaaacgctgaattggaatatgtgatgaaaaatatacaaaacacaatgatgacgacaagagctgcgctcaagcatgttttgacaaggcttccgccatatatattgtcttcattgacatcaggatgaaaaataaatgatgtgaagacaaaaaacaccgaaacggcaaacacacagcttaaaaagtaggccacataccgttgcagattcccaagaatgtttttacgggcgatagttctcaaattcatgaaaatcgcctcccaacacactcaaggtatccaatatactttgataaaacacctgcctgtttgttcctctgtgaatctctgaaaagaaacgtccgtctttaataaaaacaattcgtttacagaaacttgctgctgtggcatcatgcgtaaccaacagaatcgtcgcttccttttcctcattcagctgagccagtgtgttcatcacttgctttgccgattttgagtcgaggtttcctgtcggttcatcggcaaggatgagcgccggattgtgaataatcgctctggcacaggctgcccgctgctgctgtccgcccgaaacctcatatgtgcgatgatcgagaatgtgcttgatttgcagcgtatccgccagttcatccaatcgggcttccatttctctcagctttaccttatccaatgcgagcggcaagagaatattttcacgaatcgtcagcgtatcaagcagattaaaatcctgaaagacgaagccgagttctcttctgcgaaacaaagccagctcttggtcctttaacgttttcggctgaatgccgttgatcatcatctcgccctgggtcggcttatcaatggtagccagcaaattcaaaagcgtggtttttccgcttcccgacggccccataatcccgacaaattccccttttgacacactgagatcaaaggcgctgagcgcttggtatgatattgttcctttatttgaatagtacgttttcgataggttcgttgtttgcaacacgttcatgttctgctcctcctttttctttattataaaaaggaagtcagcatcctcccatcgaactttcttgcaattccgctccccaaccttacaatgctgtcacattcacgagggtgtcacttgaaaacacgatggtcatcacagtgccagccccttcttttgattccgcatacagcttatggccgagacggctgcacacctgttttgctaaataaaggcccattccagttgcctctttcatggttcgtccgttttctccggtaaaaaacgcgtcaaaaatccgcggcagatcctgtggcggtatgccgattccttcgtcggcaaccgacaatcgcgtctcatgtccctgtgtttcaatccggattgtaatagggtctcccacaccttgctttgaatattttaaggcgttgaaaaggatttgctcgacaacaaaggaaagccacttttgatcactggaaatctgaacggcatttggcggcacatgtaatgttggaaaaaggcgccgtttaataaactgacgtttttcctgattgatcagtgaacgaaccatttctgccaaatcaaaggtttgcggctttacatcaaatgcaaattcctccagccgagccgtttgcagcatcatatcaagaccgtaacgaaatctctcattctcatcctccagctcctctaagaacgtcggaaaagaggatgaggttccgttttttccttcctgaatcattaaggatatgacggataccggtgttttcatatggtggacccattggttggtgaaggtgtaatgctgtttttgctgattgatatattgtgagagcctgctttcgtattgctgcccgagtgcgttgatcatcttcgtccaaagcacttgctctcctgttcttggctttctggctttcaaagactgtccgatgtcattcgaagaagaggcttgttctgcaagctttttaacatatgtgagaaaggaaatttgccgaacataatcaacagcaaaacctgcggctaaaagagtaccgggcaaaatccatatgtacatcatattttctttggaaggttctgcgccgctctctacaatgcttaaatacgcaatcagcatggcggaccctatccctaataatgaaaatagaataatggctaagcggtcgatgagataagtctttaacactccgcttcatccttccgattgacttgaaattgatagccttgtcctctgattgtggaaatgcaatctgtcagtcctgcattctccagttttctccgcagccggttgacattgaccgttaacgtattgtcatcgacaaaatcaacgtcatcccataacgcctccaatagttcatcacgagagacaatttttttatgctccctcacaaaaatagagagaagctgaaattctttttgggaaaacagaatacggacgctgttccattcggcctcattttgatcaggataaatcgtcagcccgccaagctccactattctagattcctgcggcaaagagggcgagtattcaccatatgtgcggcgcaggacgcttttgattttggccatcactacctctaaatggaacggttttgtgatataatcatcgccgccattttcaatcgccattacctgattcagctcatcggtccgtgccgatataaagataatcggcgcattggaaatggtacggatttgcctgcaccaataaaacccgtcaaaaaaaggcaggttgatatcaagcagcacaagatcaggcttcatttctgcaaattccaattttatatcattcagctgttcagcaattttcacttcatatccgtatttttgaagatgaccgcccagcaaagaagcaatccgctcatcatcttccacaagcaaaatccgatacacgttgatcccccttatatgtacatcacgatgatttttctagaagattccaaaattattatagcatgtgcggaatagtaaatcggtctttttctttttgttatgatagaatgataaaggtaaaattttcataataggcaggtgtcgtgatgaagaaaatcatgctgtttctggcaatgacgtcaattctttcagcatgtcagcccaactataccgggaaatacatagaaattggggatacactaactgactataccaaagagtgttttaaagagaatgaaattccttataaatacgaaaagggaaaactgtatatcccagaagatgcatttgatacagcgatctacacttgttcataagaaaaagcttgcagataacctgcaagcttttcacgttacaaaaaatgagtatttaatttctcttcaaatcctgaagggccgatgtcgcttttttgaatgtcaccgccgttttcatgaatcgtaaaatggcgctctgacatgaccatccttccgctcggcgtcagctttgaggcaagcagggatttgttaaaaggagatttttcatgagagtgaatgatgtccttcatgttatctaaatcaccgagatcactctcttcaagagtaaaggcgtacccgatttgccagccttctcccttgtccatcagcagaacatggctgcccttttctgtctcttctcttttgattcggaatgacccgactggtgactgtaccgtttctccggaaagcggtatcggctggagcgccaggttgatgccgaaaccgatatcaacgaggtaatcgccgttttccgcagacagccatacagcagcatgcgtcccttctagtgcccatccctcttgattgcctgcataaaccgttcctcgaatgagcttcacgtgaaacccggcctcacgcaagacaaaataaaggaaaccatttagatcgtagcataggccgccgtgctgatctttgagcagacgtcgccatagctcttcttttgtgatcttataattctcttttgcaagtacggcacggttttcgaatggaaaacggtatgccattgctttgagaaaaaggggaagatcgccgaagctgacatgatctttctcccagccaattttctgaaagcagtcttttagaaagtcactcatttttatcacctaaacttcttcttgaacgtaagcagccagcttctccagcgcctcttgttcatcttctccctgggcaatcaaggtaacctcagtgcctgtgcttaccgcaaggctcatcagccccatgatgcttttggcgtttacttttttcccatccttctcaagaaacacatctgacgtaaaccggtttgcttcttgtacaaacaaagcagcaggacgtgcttgcagtcctgtctttaatcgaacttccactttctgttgaaccataagatctccccttttctttacggttattttaaagtgacggtttgccctgtccgcagctgttctgcgatttcgtcaagttttctcagcctgtgattgatccctgatttgctgattttcccgcttgctaccatttcccccagctctttcagcgtcacttcctgataatcaatccgaagctgcgcaatttcccgaagtttttcaggcagcgcctccaggccgattctttcatcgatgtatttaatattttccacctgtctcagcgatgcgccgatcgttttgtttaagttggctgtttcacaattgacgaggcggttgaccgaatttctcatgtcccgaacgattctgacatcctcaaatcgcagaagcgaattgtgagcaccgattacgtttagaaactctgtaatcttttcagcctcttttaaataggtaatgtagccttttttccgttcaagcgttttgctgtttaactgaaactcatttaacaggtcacataatgaatcgttatgctccttataaagagagaagatttctaaatgatacgaggaggtttccgggttattgaccgaacctcctgccaaaaatgctcctctcatataagaacgcttgcagcatctctttttgaccagctctttcgaaatacttcgttcaaacacaaaattctccccgagtatttttaaatcctctaagatcgcttttgcattttctgaaaaacgcacaatatagacgttattctttttcagccgcattttctttctgaccagcagctcgaccgacacatcatattgttttttcagcaatgtatagatgcggcgggcaatcgccgcgttttcggtttgaacatcgagtacgagatggcggtttgtaaatgataaagctccattcatccgaatgagtgcagacagctcggcattaatgcagcagtccttcacttccagattcgttaattctttttttgtttctgatgcaaatgacatatagccacctcatttcaaggcttcattctttcagtaaatcaacaagaagagaggccactttatgtgtatcgtgacgtattacgtcatttttatacgttacaatttgatctctgatgacttcaagccccatcgctttcagctcttcgatatcaaaatcaacaggacgcgccgattccatttcgtacttacgttttatttcgtcgggaatgtcttcactgttcactaatatcgtatcaataaaaccgcagcccatatgctgattgagcgctttcacatgatcagcagcggtgtaatggagcgtttcgccgggctgagtcatcacgttgcaaatgtatacttttttcgccggcgcctttatcacttcttccccgatttttgggacgagcaaattgggaagaatgctggtatagaggcttcccgggccgataataatcaaatccgcttccctgattacgtctattgtttccggcagcggatcaatctgttcaggcgtgagaaaaacacgcttaatgcgctgtccgtattctgggatcgttgactcgcctgagaccacgcggccatcttccatctcagcatgcaaaacgacactggcattggcagccggcaaaacctttcctctgacattcagcaccttgctcatttctgtgacagcgtgaaaaaaatcaccggttatatttgtcatcgctgccaaaatcaaattcccgagagaatggcctgttaagtcattccctttattgaagcggtgctgaaaaagatcttcaacaagcggctccacatcggataaagcggcaagcacatttctgatgtctccgggaggcggaattttcagttcattccgcagacggccagagcttccgccatcatcggcaactgttacaatggccgtgatgtcaacaggtttatgctttaggccccgaagcaatacagaaagacctgtaccgccgccaaagattgcaattttcggcttttgtcccatcttatttccggcttctcttttcaatgtcccggtgagtaacatgagtatagtaatcctttttgaaataatcagctaaattctcggctaatgtcacagagcggtgctggccccctgtgcagccgatcgcaatgacaacctggctttttccttctcttttataagatggaagcataaagctcagcagatcaattaatttctcattgaacttttgtgtttcattccacttcatgacgtaagaggaaacttctttatccttgccagtcagcggccgcatgctttcgatatagtacggattcggcaaaaatctgacatcaaagacgagatctgcatcaattggaataccgtatttaaaaccaaatgacatgacatttacggtaaatgtctctccttggtttgtcgcaaagtgcttcacgattttttcacgcaaatcacgcggcttcatgtcagacgtatcgtaaatgatttgagagcggccttttaattcctcaagcagctctcgttccagcgcaatgccttcaagcggcaggccagtcgctgccagcggatgcgagcgtctcgtttctttatatctcgtgacgagaatggaatccttcgcgtccaggaataaaattcgcggtgtgatccacggattttcggccatttcatccagcgcttcaatcagccggtcaaaaaattcgcggccgcgcagatccatcacgagcgcaactttgctcattttcgaatttgattccttcatcagctctaaaaacttcggaagcaatgaaggcggaagattatcgacgcagaaatagcccagatcttcaaagctttggatcgcgacagttttccccgctcccgacattccagttataatgacaagctgaatatcatgtgattcactaacactcatctttctcccccctgacttgtctttctatttgatgtgctgcgggtctaaacgataactgagtagctcaaattccggtgtatacgtaaatgtgccgtgcagcagcccttgtcccttcatcataaaatcaaggatatggccgtctccaggggccataggcaggttctgaatgtcattgacatcgtgccactgcagtttgccctcctctgattcagacacattttgtcctgtataagaatcagcgacaaacgtaaacatcatccactcggagacaatgtggtcaccgtctttaataataaaggtaaaaacgccttttaattgaggatttatgatatagataccagtctcttctctgtactctctgatgacggagtctctgactgattctccgctctccatcttgccgcccggcgcgacccaccagccgcgtctcggcttttgaagcagaagaactttgtcatccgtctgaagcacacaatttgtcactctttgcaagtacgtcacctaaccttcgtcctgtcatcgtctatttattataccgcttcaagatgcctcccacaatgaagagacattgacaatcttttcttctattttacagcatattcattccttaattcagatgattttgctgtaactggaattctcttttatttatggacaaaaaaaggacacggataactggagaatccgtgccaaaaaagtgtattcattataaaaagggggtcaattactttattaatcataaccgaaaagcattacacatgtgttacagcggaattaaaacccagtaacgtaatgtgaaactcgtatgacagccctttttattttaaggttttcagcgtttcttggagctcttcgacataatgctgtacgctttgtgccgcaatgcttccgtctcctgtagccgttacgatttggcgcagtgatttttcgcggatgtctccggcagcgaaaatcccttcaaccttagtttccatgcggtcgtttgtttcgatatagccttcttcattcgtaatgcccaggttttcaaacggtttagacagaggaagcatgccgatgtaaatgaatacgccgtctgttttgaattcactttcttcaccggttaccgtatcgacaagcgttacgttaccgactttgccgttttcctcatgaatttccttcacagttttgttccataggaagtcaactttttcattatcaaatgctctcgcttgaagaatactttgagcacggagtttatcacgtctgtgaacaatcgttacttttgaagcgaaacgagtcagatatacgccttcttcaaccgcggaatctccgccgccaacaacgacaagttctttgcctttaaagaaagcgccgtcacatactgcacaataagatacaccgcgtccgcccaattctttttcgccaggcacgccgatttttttatattccgcacctgcagcaatgatgacagcacgggctttatattcctttgaaccagctttgactactttgtactctttgccgtcaatgacctctttaatatcgccataagcgtattcagcgccgaattttttcgcgtgttcaaacattttgttagaaagctcaggcccaaggatactttcgaatccaggatagttttctacatcttccgtattggccatttgtccgccaggaattcctctttcaatcattaatgtcgataaattcgctcttgatgtgtatacagcggccgtcatcccagcagggcccgcgccgattataatcacgtcataaattttttcttctgacacactattcactccttaaaccatcttttcaagtttgggctctttcttataagataagaatccccatcaaacgtattccttacccatatcctataaaatctcatggtgatacgctatttttttgctcaacacgattaaatgtattcgaaaagggtatatgttaataaagaaagagccttctgttttagaaggcccttgtcatatttattattgaacaacacgtcttacaacgcctttaaatgcttttttccagtaaggattgctcatagagtcaacagatacgccatgagatgtattgtcgtttaggaaagtaccgtttcctaagtagattcctacgtgtccatttgttttgtaagtgtcaaagaacacaaggtctccgcgtttcatttcagacgcgctgacagcttgtcctctgccaactaacgtatcagtagttgttccgcctacaggtccaaggttaacacctgcagaagcgtatgcccagcgtacgaatgatgagcagtcaaaaatacggttgttgatatcagattggctgcgtccgccgccaaacttgtacggagattgtcctacaatgcttgaaccaacgctgatcgcgccttcaattccgccagagttgctgataacagtgccgcctgaattgctgtttgagccgctgctcttcttagaagatgagccgtttgacgaactgtttgatgaaccgttagaagaattgtctgaagaatcatcagatgagcttgcttttgctgattcagttgtcgccgtttgactgtcatctgtttgtgtttcgtcagatgctttttgtgcttcttcctgctttttgatcaaagcagccgctgcttcttgttcttttttgatgcgtgcttgttcagcttcagtatttgctttttgatttgcaagttcagacgcctctgattttaattcagaaatcgctttagccgttttcttctggcttgcttttgcttcgtcgaaaagcttgtctttttcattaagctgtttatcaaggtctttttgcattgtttctaatttagccaatgcagcttgaacttctttcagcttgtcattcaaatccgcttcagaatcctcgagcttcgctttatcctgctcttgctgtttgattaaatctttgtctgcgtccacaatagatgaaaccgcagtcgcacgagagataaagtcaccaaagcttgttgatcctaaaagaacatctatgtatccttgagatccgccgctttcctgtaaagaacgaacgcgttttttcaggatttcattgcgtttttcgatgcgtgcttcagtttctttaatctcttttttcagttttttgatttcttcttttgttttatcattttcttcttttttatcttcgatcttgttacttgtatcaagcgccttagcgttaatgtctttcagttctttttcaatctttgattgattttcctgaagttcagttaattctttttccttcgcttcaatgctggaagcaacctcagattgcttgctttcgattttttgtttcttttcatctaatgtttccgccgatgcagttttacttgtaaatgggatcaaaaaactgcttgtcccgatgacggaagccaaaccaagtgtcaataaactctttctcactttttatatcctcccttttactgtgaacctgtcctcatttggaatcgtattttgaacatcaagtttcgttcctcatactctacgaggaatgatggttgtttatggttaattattctgtgcatctcttattctggttgtatagcgtttatttcacatcatatgtaaaaaacactaattccttatgtacgagaatcattataccatcaagtttcgacaaattagcgataaattttattacatttatgtttcaaacagatgtcaagtcacacatcatttgtcatttttcttaagcgtgcaaaaaaactgtcgatattattttttaaatataatctatcaaacaaaaaagagtcgattaaataaatcgactctttaaaatttactattctagaatatcatcaatatatttcatatatttcgtcaacgttgccggagagatgccgaatcgggccgctgtgtcttttttcgtgtcttgcttgccatgggcttctttccaaatataacagatggctgctgcccagcctttctcattcttcaacggagcagctgcacgaatttgctggatgacatggaaaacccagcagctcatgacttctgttttcatctcttctttttcagcttgctctaatagtttgaccgtttgataggcgaaaagtgcatcctctgaaacgtcagcagccgcggaatctccattcagaagcagctttacaaaatgattttcaaaaggagcggtgattctctttgagcgtatcaccgcttcaagatgctccgtttctccctttgtgctgctgatataataggctgcgagacgctgttccacagatgaaggaagagcttccctccgctcaatccaaggcgccgggcggtcttcgccgggatattgcgactcgacttttctccagatcgtctcggcaaagtcggtatgtcccgtaaaataagcagagcaggaaagccagtaaaagaaggtgtcgtcaccttcaaagccggttttatataatgatttgagccatttatatccgatctcgtagcggccgacaagcgccaaagtagcacccaatttataacgctgctccattagcatcggatagacattggagagctgatcactcaattccaccactttttcgtcttctctttcataatagtagaaaacgagaagattgcataaggcgtgaagatttccttcattatgagaaagcacttcataagcggtttgcttcgcttttacaacgtttcctgaatagaaataggcaagcgcgagattgttgtatgctgaccaaagctccggatattcagctgtgatttcctcaagcgccgcaaccgcttcagcaagctggccgctttccagcaatgactttgcccgatcctgtttcaccagcagttcatcctgatcatacaacgaatcctcaatgccgtcgtctcctaaatcgagcaaatcaagcagactatcgttttcttcggcgaattcaccatccgggtccgcatcagaataagcggccgcttccttataagcttcctggaagagccccagatgggcaaagttattcgctttaaagtaatggcactccggcatttcggcctccagatttgccatgatatagtcaagaagatcgttcgactcttgatattggcccatttccgaataaatgaccgcaagctgtgaaagcatctctgaatcctccggctccaaatgaaccgcgcgctgaatcagtttgcttgcccgttttagattgcgctctttatacgctttcaagcctttatgaaaaaaatattgtccatcttgaagcagctggacaatttgtgcgtgatttttatgttcagaagtgtgttttcccacaactaccctccgttttatacaatattaccgtcagtagtataccataaatcgtaagcccctcaatagttcaaaaggaaggattgggaaaatccctcctcttttttattggctgattcgaccagaatttacccggctttgttttctaagtccgcattcattttcagctgctgttcagcaaaatccctataaagaccatgggaagccattaactcatggtgtgttccacgaccggtaatttcccctttttcaacaaacaaaagctggtccgcatctacaacggtagataggcggtgagcgatcacaatcgttgtgcggccctccatcagcacctcaagcgcctgctgaactgatttttcagattggctgtcgagacttgaggtcgcttcatcgagcataagaatgcttgggttacggagaagcgctctcgcaattgcgattctctgcctttgtccgcctgacagcataatgccgcgttcgcctacttctgtatcaaactgattcggcagctcctttataaaattgagcgcatatgccatctccgcggctttttcgatctcagcatccgtcacatctcgttctaacccgtagcaaatattttctctgattgacccggacattaacgggctttcctgcgatacatacccgatatgctccctccacgattcaagcgagtaagtatcgaccggctcgtcccccagtcgaatggtccctgcagtcggagtataaaaacgttcaagcagcttaaacagcgtcgttttccccccgccgctcggaccgacaatagctgtgactttacctgcttcaatgacggcgctgatttcttttaaaatcagctgatcaggcttgtatccaaaagacacgcgatcaagctgaatagggagatgcgcattttcaatttgttttcctgtcactgtatcttcttcttcctctgctaaaatctcaatcattcgttctgttgcaccgattgatttttgcagctgtgtgaaaaacgttgtaatctggcccatcggcattataatttgaaacaaatataaaataaaagccacgagcgctcccgccgtgagttcgcctgaagatacctgcatgccgccatatccgatcactgcgacaagcgctgccattagcacgagtgagataagcggaccgacaagtgattgaaccttagcttctcgaacgccaagcttaaataatgatgaaatccctgttttcccgcggccgtattcgacatcctccgcatttgaagctttgacaagtctgatttccgggagaatttgattcagcaggcctgtaaaacgggctgtttcatcttgtgtttcccgtgaaatggagaacattttccgtccaatcggcaccaaaataagagcggccagcggaacgaccactaacacaagcagtgtcagcttccagttcataataaacaagattgtcaatgatccaatgacagaaatgatgcctgtaataaatccgctgatatgggttgtaatcaattctttgaccaccatcgtatcgttcgttacacggctgactgtttctccggaagcatttgtatcgaaataagagacaggcagcttaattaatttcttccataataactcccgcagcccggaaatgattttttgtccattatagttaagcgcataggtggcataagcgcttaaacccgcctgaacgaaaaacaccagcgcgatcaaaccgatttgcgtgcctgacagatttgacatagaaaaaccatcgacaagctgcttcgttaataatggaatgagcaggctgaccagcgtggttactacactgagggcaagcgcaaaggcgagctttccataagaaggattggtccgtcttactaaggcaaaaaagggtttcaatttacttttagatttttgtttcttggttggcatatattttcctcctgtttcagcgttcagaaaggtgaaaagtcatagcaaaaggatgatttttactctttctcaatcatatcaatggagaaagactttttcagtatatttttgccgtgatcaaaataaaaatctcccactcattgtttgaataggagatttttgtgttagacatctttcactggcttcttttttctgtaagtcaatgttacatcctgctgtcgcaggtcttctattatcattttgtaccgatcaacttttgcggtatgttcttcttttatcatctgaagggcagcttttcgtttttcgctattagactcaagctctttttttattttttttacaatcaaccctttttgccctttgatttcctcttttaatgaagactcaaatttctttgtcaggctgagaaagtcgttgatcggttgattgagggtgcccgctttccccttcatttcatcttgggtaagaaacatataggtcgttgatacaatttctgtttcactttctgaaaataaggaagtcactcttcatattcctcctaagactgaaaatcaaataactgagaaatcatttcttctttttcaaacagcttttcaatactctcgcggatatttttgataaaatctcttttttctgttgtctgtttttttaattcagcaacaattccatcattagcaggaagcgcacctgtgtggaatgattcatgaactgagattttctccaatttatcgaatgtgtggctgaaaccagctgcaagccggaattgaagatcgaaggcataatgcgaagggttttcttccatatgatgaatagccgtgatgatcgcctgctttttgtctatgaagtcttcatcgatttcctgactgtaaaccttctggtacttagaaatcgcatcttccatatcttcaacgattttcataccgttttgatagattctgacagcggatgagagattgacttgaatcgtttctcccgagccactcttccctgtaaaataaatatcggagcctttatagctgaagcctttttcctttgacaaggcgttgagcatttgaacgatgctgtggccgtcgacgataagttttagtgcgtcttttgtttctgtgtcgagtgttttcaatgaggacagaattgattttacatagtccactatttcaccaacgtcttttaaagcttgcataaattggccatattttagatggtctatgaaatgttcgtaccgtgactctatgcctcgcatactcgcattaatattcgttaattcttttttgatgactttcttttgcgtttcatcaatataaccattttcagctaactgatctacgaccggtccgctgtttctcaacaaggtatgaagaaaacctaaaaacgacggcagttcctcttttattcggccatacatttgcttaacatcatcaaaatgctcatataggacacttactttctttaaagcgccgtctgtgtttttcactttttcaatcaggtctatgtctatcccgctggctgcctttataaaaccgttcaagccgtctttttcatagtcatccttatatttttgaaggaatttttgaattgacctcacatcttcgtcaggaaccccatccataatgtttcggatgccttttacacttgtatttgtatctgccatcttcacatcaccgaatgtaataaaatcggccttgccgctgactccatacagcgggtcatcttttgagatgcgctgagtgatgtttgttgttacgcctttgtcttcataatatttttggatttctttttttaacttttctggcgggatggaatctatatcttcatatttataactaaatttcctaataacatatctatataaactttcatcagtttcaagtaattgatcaatattgacttgagctccatttaccccataaacttcatcatattctccatcaatcaattgcaccataacttggttattatttgcaagtgaatgtcctaaggcgaatgtttttaaatcctcagagttacctgctgctttctttgctttgttagtaaactcctttgtagcctcatactgactatgatcaattcctaaaaaaagaccaaaaaagttatatgaccaatccttattatcggcactaccttctgaaataatctgaagctgatcaatatgttttttctcatctattatatggattgccgttccatcgtaacctgattctctggtcgaactttgtatacttgtattctgatttacaagttcattggaggtgtaaatttcaattttcatattctcaggaagatcgtggtgggtttcctctttataaattctgcgtatatctgcttcgaaatccttcttagctttcttaacttcactcgcaatagttgaggcaaacttttgtttatagtcatattctaaatcaattaaccttaactttacgttctcattctcaaatacatttttatttcccatcttatttctcctttttatctattaaaaaggtgatagaattaattaatttctcaactttatttttagccttttcttcatctaaggagcatggttgattttcatttttgcatccaagggtaaaggcgtattctactcctaggttatcttcctctgtagacttaacatatccaaaataactgtatgaataattatattttctatcaatatcgtcaaagatgtcttttttcttggcagtgtaaatatccgttttctttttgctgctttttttgtattcgcctttataatcattttttccactaacaatatctagcattgtcttaggttcattcgcaaaactttcttctttgtaatatgttacatggccatcaaacattacattggtgtctttatcataactattaaatccaatactttctttgtttttcccggttaacgatgatcttcttgatagatactttccatcctccggaaacaacatcctaaaccctttcagcttagattccagcaaataatatcctggttcctcttcttttgttgacaccatgtactctctcgttttctcgtcctgaaacgcaggtacttgaggcagatccttgggatccatgtcttttggttttaccgcttctgttttattgtcatttgtgctgtttttatcattgtcattcatactgcatcctcctgtcagggcaagtaataagctgaagcaaataaagatgatctttttcattacgaacctccacgggttttgtgagaatagtattctatttttatatcaaaaataattctattgacctggttaagagatgattatttcatcctttttcatgttacatcatggcggaatttggataaataggaaatgagactcggttttgatctccttttattaactaatcatatataacacccaatataaatctaaatacctattacttttttcacaaaacaaaaagagccgtatcatccggctctttactcttcaatctcagaatggcgttttttcaatacgtcaagcacatcatccagcggcagggattgttctctgagcaggacaagcaggtgatacagcaggtctgccgcttcccatttgagttcctcatgatcccggtttttcgcggcgatgatgacttcggatgcttcttctccgacttttttcaaaatcttatcgacgccttcacggaagaggtacgtggtgtaagctccttcaggcatttccgcttggcgttccgcgatcacccgctccagttcgttcatgatgccgaatcggtccgcggcctgttcttctgtttgttcctttgtaaaacagctgtagctgccagtgtggcatgccgggcctgacggttctacgagtacgagcagcgcgtcttgatcgcagtcataccggatacctttgacggcttgcgtgttccctgaggtttctcctttatgccataacgcttggcgtgagcggctgtaaaaccatgtttccttcgtttccagcgttttttcgtacgattccttgttcatatacgcaagtgtcagcacttctttgcttgccgcatcctgcacgatagcaggaattaatccgtcctcgttaaaacgcagttcatctgcctgtttcatctcacattcaccccgtactctttcaagtatgatttcacttctttaatcgatgtttctttataatgaaaaattgaggcggccagcgcggcgtcggcttctccttttgtaaaagcctcaagcatatgctgtgcgtttcccgcgcctcccgaagcgataacagggacggggacagcttcggaaacaagctttgtcagcgtgtggtcgaaaccttttttctcaccgtcggagtccatgcttgtcagcaatatttctcctgccccgcgtttgacgccttcttttgcccacgcggtgacctcccaatctgttttctttctgccgccgtgcgtatagaccttatatgtgtcagattctttgtcatacttggcatcaatggcaagaacgatgcattgcgaaccgaaaaactcggctccttctgcaatcagctcagggcggagaacagctgccgtgttcaccgacactttgtccgctccggcacgcagtatcgttttcatatcactgagctgattgatgccgccgccgactgtaaacggaatggcaagcttcgcggcaacctgctccacaacgtcaaccatcgttttgcgtccttcatgcgaggcagaaatatcaagaaaaacgagttcatccgcgccttcccggtcgtacacttccgccagttcaactgggtcaccggcatccttcaattcgagaaattgaattcctttgacaacgcgtccttctttgacatcaaggcatggaataatccgttttgtgatcatttgcgcttcaccctttcaagcgcctcacacagcgtaaactgattggtatacagcgcttttccgatgatcgctccagagacgccgtccgcctcagagcgggcgagagcttcgagatccgcgacggagctgactccgccggaagcgatcaccgatttccccgtttccttagcaagctcgaccgtgcttttaacattggggcctgacagcattccgtctgtcgcgatgtcagtaaaaataaagacttccgcaccttcattggctagctctttgcccagttcagttgccttaagggttgatgtttccagccatccctctgttgaaacaaaaccgtttctcgcatccagtccgattgcaattttctcgccatattgtttcagcatttttttgacaaacggagggttagaaactgctgagcttcccaggatcacccgatcgactcctgctgataaatattcatagacgtcattttcggaacggatcccgccaccgatttcgactttcaggttcagcttttgcgtaatctcaatcacatggcggtcattcactcttttcccttctttggccccgtcgagatcaacgagatggatccattcggcaccctctttcgcaaataactcagccatgtcgtacggtgaatcgccatatatcgtttccttattataatccccttgaacaaggcggacacatttgccgtttctcatatcaattgccggatataatgtaaaagcactcattttttcaccttctgttctgctgccattttcgtaaattgagttaaaatagacattccgaccgtgctgcttttttccggatgaaattgggcgccgaagacgtttctttttccgactacagcaggcactcgtacaccataatcggcgcttgccagaagcgcgttctcctccatcccgtcaatgtaataggaatgaacgaagtaagcgtagccttgttctgtttcagacagcagcggagattcgttatgaaaggaaaggaggttccagcccatatgcggaaccttcagcttgtttcctttttcatcttctgctttcagcctgactgcttttccttttaacagcccgagtcctgaagcggtgccgttttcttcgctttcttcaaataaaagctgcatgccgaggcagatcccgagaagcagccttccctctgagaccatatcgtgaatcaattgatcaagcttcgtgtagcgcaaattgtccatcgcgtctccaaatgaaccaactcccggcaaaatgaaggcatcagcttctttcagctcctccggcttttcagaaacaaaatacggcacgccgacacgttcaagcgcctttgagacactgtataaattccccattccgtaatctatcacgccgatcatttacagcatccctttcgttgacggtattcctttaactcgcggatcgatcgttgtcgcttcatcaagcgcacgtcccagtgctttaaaaacggcttcaatcatgtggtgggtgtttgtgccataatgaacgatgacgtgcaggttcattcgagcttcgagcgccagcttccacaaaaattcatgtacaagctccgtatcgaaagttccgactttagcagccgggaaatcagcgcgcatttctaagtgcggccggttgcttaaatcaatcacaacttgagcaagtgcctcatccatcggcacaaacgccgatccgtagcgtttgattccttttttatcgcccaacgctttgagcagcgcctgccctaagcagatgccgatatcttcagtcgtgtggtgatcatctatatcaacatcgccttttgcgttaatggaaagatcgaattggccgtgtttcgtgaataaatccaacatatgtgtcataaacggcacatctgttttgatatccgcttgtcccccgccgtctattgtaaatgccagttcaatatctgtttcgtttgttttcctgacgcgttccgcttttctcatttagaaatcctccgttctctcgcttcaattgatctggcatgggcttctaacccttccagtctggcaaaagccgcgatgctttcggcatgttcttcaaaggctgattgactgtaagaaataatgctcgatttcttttgaaaatcagttacgtttaatggacttgaaaatctggctgttccgtttgtcggaagcacatggttcggtccggcaaaataatcaccgacaggctcagggctgtatctgcctaagaaaattgcacccgcatgtttgatactgccaagcaaagcttccggagactgtgttatgatttctaaatgctctggcgcgagtgtattgacagtattaatcgcttccaccattgtttccgccacatatatacaaccgtaatctctcactgaagcttccgctatttctcttcgcggcaaggttttcagctgcttactcacctcggctgaaaccgcctcggccagcgccatggaatctgtgacaaacacacatgagctgagcttatcgtgttccgcctgtgacagcagatcggctgcaatttcgctcggaatcgctgtttcatcagccagcacgacgatttcactaggtccggcaatcatatcgatatcgacatcgccgaacacttctcgtttggcaagcgcgacataaatgttgcccggacccgtgattttatccaccggttcaatggtttctgttccgtatgctaacgccgcaatcgcctgagcgccgcccattttgtaaatatcttttatgcccagctcggctgcagcaaccaaaactccaggagacagcagaccgtctttttccggaggcgtgacgagaacgattctttcaacgcccgctacgagcgccggaatcacattcatcaaaacagatgaagggtatgcggccgttccccccggcacatatacaccggcggaatccagcgccgtcactttctgccccagcattgtgccgtcctttctgtgataaaaccaggaggattgcagctgtctttcgtgatattccctaatattttcgattgcctgcctaatcacctgaagaagacgtgaatccagtgaggtgtatgcctcctcaaattcttcttttgtgaccagcggactgtctatttcgatgccgtcaaatttcgccgtgtagctgcgaaccgcctgatcaccgtttgctttaacatcttctataatggaccggaccgtctttctttgctcttccgttccggcatcgatggaacgcttgagagaaagccgttccgctccgctgatggttttgatcttcattttgccgtctctccttccacaacgagagataggcgggatgccatttcgtcaatcacatcgtctttcatgcgatagcttaccgggttgacaataaagcgagaggtaatgtcacaaatgtgctccgtttcaacaagcccattttctttcagcgtctgtcctgtggaaacaatgtccactatccgatctgcaagcccaatgagcggagccagttcaattgaaccgttgagcttaataatctcgacttgttctccctgctctctgaaataactggaagccacattcggatactttgtcgcgattcttggcgctactccgctccagtctgtattcggaagtccggcgacagctaagtggcatttgctgatttttaaatccagtacctcatacacgtcgcgttcctcctccagcatgacatccttgcccgcaattccgacgtctgccacgccatgctccacatacgtagttacgtccatcggcttcgctaatatgaaacgaagattttcctccggcacatcgatgatcagttttctcgaatcttcaaactcctcagggagcctgtagcctgcctgcctcagcagccctgccgcttcttcaaatatccggccctttggcatcgccattgtgagtaacttacccattttgctcttcctttctggcaccgataaaataagtgacgtttgcaaaagattttgtcatctggtcgatattttctattcccgataaatcttgaagaaccactttgttccctttcatgcgttcttcattcgcataagcgatggcttgcgcccgctgctctttgctgaaaataacagcgtctatatcacaaggttcttctttcatatgaagggcttcaatcagccggtcgatccgaagcccgaagcctgttgccggtgcaggtgaatcaaaatggcccagcagcttgttgtaacggccgccgcttccaatgacaaaaccgacattctcggcgtacacttcaaataaaatccctgtgtaatagctcatgtggctgaccatattcagatccaggcggacattttccgtacatccgtaatcctcaagaatgtcccacagcgccttcagctcatcaaccacgctttttccttgcgcagaatcgacgatttcctcggcacgtccgcatacttctataccgccccgcagttcaaggagctcaagcagcctgcttttatcaatggaggaaagcgggagagacttgacatgctctctgtaaccgacgtagttcttttcatataagaacctccgcagcacatcagctcgttcaacgttcccgagcacctcaacaaacaaagcatccgcaatgccggcatggccaatggcaattttaaaggatgccagcccagcgtttttcaatgccccgacgactaaagcaatgacctccgcatccgcgctcgttgtgccgtcaccgattaactccactccgacctgctcgaactcagccggacgtccgccttcacgctcctgagccctgaatacatttgccgcatagccgactcttagcggatgaccgtgtttcagaagcttcgatgccgccacccttgcaatcggccccgtcatatccgggcgaagcaccaatgtcttgccgtcctgatcaagtagcttaaacagctgctgctcttcaattgctgactggacgccaaccgtatcgtaaaactccagtgtcggcgtttccataaattgatatccccatttatcaatcaaatcggttaacgatcgtctcaccttttttttcgtttcgtataaaccgggcagtgtatctctcatgccgtgcggtttttcaaacataaacatcaacccgagcacctccgctgttatcttatgaaggaaaattccgaatcctttagttcgctaatatgataatatgttagcagatgaaagaatgaaaatcaacgcttaacttcagtaaggatatttttagttcaaatatccttctcctcattatgaaaaaatcatgaataatgtattaaaggtacgtaatatctcaaattctttatgtttggcatgctataatacaaatcaaatagagaacaaggagataaagatgaaaacactgcgaactctatgtgtcctgatgattctttcaggcgttatttttttcggacttaaaatagatgcaaaagatatagatattccttttttgaacagccttaaaaaagtggtttctgatagcgatacagatacaggtgcgaatagcaaaaaggagctgaagggaagcgcaaaaccgctggatgtcatcctttacaatcaaatggacgcaccccggctctataacggctgtgaagtaacaagccttgcgatggtgctgaattacgcaggatacgacgtgacaaaaaacaccctggcaaatcaggttgccacagtgcctttgacatacagcagcggattaaagggtgatccgaatgacggatttgtcggggatatggcgaatggccctggtctcggtgtctaccatcgaccgatctatcagctggcgaaaacctatgcgggagacaaagtgtctgatctgactggaaaaagcatttctgctgtttatgaacagcttgaaaaaggcaatccagtttgggttattacgacagccaactttacgccagttgacaacatgcagacatggaaaacaccaaacggaacgatagagattacgtacagcgaacacagcgtcgccgttacgggatatgatgataaatatgtgtatctcaatgatccgtatggctataaaaacagaaaaaccgatagaacaagctttgaaaaagcgtggaaacaaatgggcagccaggccatagttattcaaaagtaaacgcctgaaagccgcactatgctctatcctgagcaaatacgacaatattcatgctttttgtttcaatcggtaagatcgattcattttccatttatcatccagaattatctttactttcaggctgtctgtttttatgattaaagcagattcagccttgccccgatctatgtgagagaagccggtgcaagtcgctgacgcttctcttgcaaaaaatgaaagatatccggggaggatttatcattgaaaaaattcgtgtctatcctatttatgttcggtttggttatggggttcagccagtttcagtcatcaaccgcttttgcagcagacaaagtggtgcacgaaacaattatcgtaccaaaaaatacaacatatgacgggaaaggacagcggtttgtggcagggaaagaattaggcgacggaagccagtcagaaaaccaagaccctgtttttcgtgtggaggatggtgcaaccctgaaaaatgtggtgcttggcgcccctgccgctgatggagtacacacttatggaaacgttaacattcagaatgtgaaatgggaagatgttggtgaggatgcgttaacggtgaagaaggaaggaaaagtgacgatcgacggcggttctgctcaaaaagcgtcagataagatattccaaatcaataaagccagtacattcacagtgaaaaacttcacggcggacaatggcggaaagttcataagacagcttggcggttcaaccttccacgttgatgtgatcatcgataagtgcaccatcacaaacatgaaggaagcgatattccggacggacagcaaaacaagcacggtcagaatgacaaatacacgctactctaatgtcggtcaaaaatggattggtgttcagcatatttacgaaaacaacaacactcaattttaaccaaaaaagtccgctgatgttattcagcggactttttcaatctttcttgcatttcttccttcgtatagatgatcctcatcggatttccgccgacaaatgcgccggcaggcacgtctttatggacaagtgttccggcggacacaactgcgccatctcctattttcaccccgggcagaatggtcgtgttggcaccaatcatcacttcgtctccgatcagaactgtgccgatccggtattcgtgaatcaaatactcatgggccagaatggtcgtattgtacccgatgattgtatttgttccgactgagatcttttccggaaacatgatatctggcatcaccatgagggcaaaggatgtctgatttccaaccttcatccgcagaaatgtacggtacagccagtttttcatccctataaacggcgtatatctcgcaatttgaatgacaatgaaatttttgacgacctttaaaaaaggtaccgtttgatagacatgccacagtgagttggcccccgagaccggatgacgatctgtttttctcacagattacttcactccaacgatttgtaatagatcactcattttctcaagcataaaatcaggctcatgcttcgccagcatttccggccctttaatcgtccatgcgactcctgccgtttttgtaccggcgtttttgcctgccagcacatcgtggtaattatctccgaccataatggcttcctcgggcttgcttcctaactgtttcagcgctaacagcacaggctcgggatcaggctttgcatttgtcacatcatcaagggtgacaactgtttcaaagaattcgccgattcccgtgagcttgaggcccatattgacagtatctcttaattttgttgtcacaattcctaatgtaaagccggctttttttaatgcatccagggtctcatataccgtttcatattcagtcacgagtgaatcatgcatgtcatgattgtacgctctgtacatagcgatcatatcctcgcatttatcagggtccatcgaagagaacgtttcaaaaagagacggcccgataaatgcaaggacatcttctcgtttatacttgctcggataataatgctccagtgtatgcaaaaaggacgcgataattaattcattcgtattaataagcgttccgtctaaatcaaacagaatcgtcgttacttgtttgtcactcatattgcttcctttccaaccgctgagggtttccattttttccacgtgtgcgcaatagccattgtcagcagaactgctgtggtgacacgaatcaaaagaagcggccagactggtatgccgagcggaataaagacaagtgtatcttccacgaccgcgtggcaggcaacgagaaatataaatgccaatgtcatatcccgcttgctcacgccgtcatcctcgacagctttgatcatgacacccgctccgtaggccagaccaatcgtcagtcccgccaccatcgtcatagacgtatttttattcatgccaagcagctgcgtaaacggcgacagccacctggaaaaccgatgcagccagcctaaatctcttaaaaactggatgataatcatcagcgggatcactattgccgccagctgcaaaacaccaagtccggctttcgttaatgcttctgccaacattcctagccagctgtctggcgccgcgctcttcgcagcgataaaaccgtactgcgccgtttcctttccgccatgccaaatgaggttgatgacgatggctgacacagcggccaaaccgatgcgcacggccaatatgacgccaattctgataccaacctttgcggcaactgtcgattcgataatcaagttatgacagaaagaaagcataacagctaaaataaagacttctttcacagataaatccaatgttaaaatcccggcaattcccgcatacagattcagcatatttcccagtacaagcggaatggccgcttcaccagaaagcccgaagagacccattaccggtgtgatcagccgtacaagccaatccatgacaggggtatgctgaagcaaagtgaccaatagcgttaccgggaaaatcactttacccagcgtccatgttgtttgaaaacctgctgcaagaccggccagaaagatcttcttcatccctcatcccctttgttgacgtctactccgcgtaccgctccttcgaatatcccttgacgcgtctgaagatgatggctgccacagccaaaacaatcaatacgattgaaatcacctgagcgatgcgaagtgaatcagtcagcattaagctgtcagtccgcattccttcaataaagtatcttccgattgaataccaaatgatatagatcaagaacatctcgcctctacgcaaattcactctgcgcagcagcagtaaaacaatgacgccgacaaagctccatagtgattcatataaaaaagtaggatgataatattgcccattgatatacatttgattgatgataaattcaggcaggtgcaggttttctaaaaaggctctgctgacagcctcgccgtgcgcttcctgattcatgaagttcccccagcgcccgatcgcctggccgagcaaaatgctgggcgcggcaatgtccgcaagcttccagaacgaaagttttttcactctcgaaaacacataacccgttaaaatggcgccgattaatccgccatgaatggcaatgccgcccttccaaatcttaatgatttctcccggatgtgccgcataatagtcccattcaaaggcaacgtaataaattcgcgcgcaaataatcgcaattggaatggcaaacaggacaagatcaataaacgtatctttctgcagcccccgtttttcactttccctcatcgcaatccacagcccgagcaaagcaccgagaccgataatgattccgtaccaatggacggctaacggccccagctgaaatgctatcggattgagtggttctatcgcttcattcatttaacgccaactcctattcttcttgttcaccgtcttcaatgacgtccgccagcttgttggtaaattgttcagcggcattcagccccatccgcttcaatctgaagttcattgctgccacttcgatgatgactgcaagatttcggcctgggcggacgggaatcgtcagttttgtaatttctgtatcaatgattttcatggtctcttcctcaagtccgagccggtcgtattgcttgccctgctcccagagttcaagattcatgacaatcgtgattcgtttattgcttctgaccgcgccagcgccaaatagcgtcatcacattgataatgccaaggcccctgatctcaagaaggtgctcaattaattccggagcgtttcccacaagagtatcctgatcctcctgccgtatttcaacgcaatcatcggcaacaaggcgatgccctcttttcacaagctccagcgctgtttcgctttttccgacgccgctctttcctgtgatcagcacgccgacaccatatatatcgactagaacgccatgaattgctgtggtaggcgccagcctgctctcaaggaagttggttaaacggcttgacagtcttgtcgttttcagcggcgatctgaggacaggcaccccatttttctcggaggcgtcaatcagctcctgcgggatgggcatatctctagaaagaataatagctggtgttacatcagtgcacagagaatccattcgctgttttttctcctcttcaggaagctgttcaaagaaagaaagctctgtttttccgagaagctgcacgcgctctctcgggtaatatgtaaaatatccggcaatttcaatgcctggtcttgataggtcactcattgtaatcgggcggttaattccttcttctccgctgattaattccaaattgaactgttccattacgtcttttgtgcgaacctttgccacgatatgttcctcctgttccgggctgccccgagcttgctcacaatactttcattttatcactttcaggcttgaacctaaaacagattttataaaaggcgggaaaacacctcagctggtctagatcactagtctgaaaaagagtaaaataaaggtattcaaattccagaaaggcggatcatctatggcagagagtcttcttatcaaagacattgcgatcgtgacagaaaatgaagtaatcaaaaacggctatgtcggaatcaatgacggaaaaatcagcacagtctcaacagaacggcccaaggagtcatattcaaaagaaattcaagcacctgcgaattccgttttgcttcccggcatgattgacattcatatccacggcggctatggtgcagatacgatggatgcaagcttttctgcgctcgacatcatgtcgtcaagactgcccgaagaaggcacgacgagctttttagccacaacgattacccaagagcatgggaacatttctcaagctttggtgaacgcaagagagtggaaagcggctgaagagtcctctttattaggtgcagaactgctcggcattcatttagagggcccctttgtttcgcttaaaagagccggagcgcagccaaaggagtggattaggccttcggatgttgcgcttttcaaaaagtggcagcaggaggcaggcggactgatcaaaattgttacacttgcgccggaggaggatcagcattttgaactgatccgccatttgaaagacgaatcgattatcgcatccatggggcacacggatgccgattccgcattgctgtcggatgccgcaaaagcaggggcgagccatatgacccatctgtacaacgcgatgagcccgtttcatcaccgagagcccggagtgatcggaacggcgctggcccatgatgggtttgtgacagagcttatcgccgatagcattcactcccaccctttagctgcaaagcttgcttttttggcgaaaggcagcagcaagctcattttaattaccgattccatgagggcaaaaggcctgaaagacggcgtatatgagttcggcggccaaagtgtgacggtaagaggacgaacagctcttctttcagacggaacccttgccggttcgatcctcaaaatgaacgaaggcgcacggcatatgcgtgagtttacaaattgctcttggacggatatagctaatataacttctgcaaacgcggccaaacagctgggcatctttgaccgaaaaggcagtgtgactgtgggaaaagatgcagatttggtgattgtcagcagtgattgcgaggtgattctcaccatttgccgcggaaacattgcatttatatccaaggaggctgaccagatatgaaagtaatggaatgtcaaacgtatgaagagctaagccaaaaagcagccagaataacggcagatacaatcaaagaaaaacctgatgccgttctcgggttagcgacgggcggcacaccggaaggcacttatcgcgagctgatccgcctgcaccaaactgagaatctctcatttcaaaacgtcactacagttaatttggatgagtacgccagactttcaagcaatgacccgaacagctatcacttctatatgaatgaccgtttatttcagcatatcgacagcaagcctagccggcattttattccgaatggaaatgcagacgatttggaagccgaatgcagacggtatgaacagctagtcgagtccctcggcggcactgacattcagcttctcggcatcggccgaaacggacacatcggctttaacgaaccgggaacctctttcaagtcgcgaactcatgttgtgacattaaatgagcaaacccgccaagcgaatgccagatattttccttccatagacagcgttccgaaaaaagcactgacaatgggaattcgaacgattctctcaagcaaacgcattctgctgctcatttctggaaaaagcaaagcggaagctgttcgtaagctgttagaaggaaacataagcgaagattttcccgcatctgctttgcacctgcattccgatgttacggttttgattgatcgtgaagccgagtcattaagaccttgaaaggaacatgctgacttatgaatatcaataaacaatcgcctattccgatttactatcagattatggagcaattaaaaacccaaattaagaacggagagctgcagccggatatgcctcttccttccgagcgcgaatatgccgaacaattcgggatcagccggatgacagttcgccaggcgctttctaatttagttaatgaaggcttgctctatcgcctgaaaggacggggcacctttgtcagcaagccaaaaatggaacaagcacttcaagggctgacaagctttaccgaggatatgaaaagccgcgggatgacaccgggcagcaggctcattgattatcagcttattgattcaactgaggagctcgcggctatattaggctgcgggcacccctcctctatccataaaatcactcgggtgcggctggcaaatgatattccaatggcgattgagtcctcacatattccgtttgagcttgcgggtgaattgaacgaatcgcattttcagtcgtcgatctatgatcatattgaaaggtacaacagcataccgatttcccgtgcaaaacaggagcttgagccaagcgctgccaccacggaagaagcgaacattcttggtattcaaaagggagcgccggtcctattaatcaaacgaacaacatatctgcagaacggaacttcttttgagcatgcaaaatctgtatacagaggcgaccgttatacatttgtccactatatggatcgtctttcataaaaaaaaagcctccaaccctttttaaggattggagacatggcgaaaatcaaactggtctggtgctggacgatatgtctcttttttcgtcttgaacttccagatcggtgatttcgttttgccattaaaactgtcttccactataatgtaccaataataaacagactgcggttcaagatgatcccagcggaattcagctgtatccccgctcttcacttgctcccgttttccgagctcttcattggtatatacgttacattcaaaataatcggtttccacctttttgattcttggcttcaaatcaagcgaaagggaaaattcatccttgttgccataggtatccgtatcatagtaattcttatcctttacatacggagaatacgtcgatacgtgcaccatgtcattggcctggtcaaattgaagcaaacgcaaatacccttgaccgccttctggcccgccctgataatcggccagcatttgatgcacaagacgatccggcttcccatcaccatcatcatccagctcatctgtttttctcatcgcactatgataatgcccgctcaataccatcacgacattcgggttcggctttacgatttctttgaatattttctctccgattgggcttctgtttccgctgaccagcaaatactcatgaaaagctaaaatggccatccggtcagggtgtttcttcagcacctgattcatccacgcgatgtcttcatccgtaatgccccatcccatgtacagcatgatataatcattgccgttgctagaaatcaggtcataatgtccgcggttatttttataggaaccgccataatgcaattttttatcaaaacgatcgctgccaaaatatttgccaaacaccctgtaggagccgtccttatgtccgacatcgtgattgccggccagcactccgtaaggaattccgctcttatccagaacggacattgaccgatcagcgtttttccactgtctgatatcggcggaatcatctacaatatcacccgtgtggaacacatatttgatattgagctgcttttgattatcttttatccattcggtctgtttatcaaaaatatgcggatagctttcggcgtaatactgtgtatcagacatccagacaaatgtgtacatatccttcgcaggaggaatttcatcctgtacaatcacattcattttcgactcccgtacaaaatcggcggcaatcacagacgctttcagcgtaaacggtttgtcatccttcgcgacgaagctgtcaacaggctgccattcgtttgtccgataattccaagcatacatcgtcacctttctccccggcaaagaactgcccttccagaccgcttctgccagatcattctcatcaattgatggatcaaccgtcacttcaaagcgatgataagggaaaagctctttgttttctgtcgatactgtttttccatcagcagctgatacccgctccaattctttattcgtaaatggggtctccctttccggcacaaagcttttcggcggttcagtcagtgacgcgtgcttaaatattttcacatgattgcgcgctgtatattgaaatcccctataaaaaccaacatccatggcgtcattcgtcggatctttcacccgtacagaaagcttggccttatgcgtgtcggcttcgctgtctataacctccggctggtccggatgctctcgttcggttttaaatatcctctcaatcactgttttattgcccgcgagatccgttgctgtcacttttagagaatgttttcccggcaaaaggtcagaagatgatgtatgatatgggagtgtaatgctttctccatctaaagacgcttccgcttcctcaattttgctccatttatcatacatatccgcctgcaggataaggtttcctttatacgtttgcccctcggtgatattcggctcaatgtgaggtcctgaattatctacccgtacaaccaggctgacattttccttgccgtcgcttgcttgaatatggtgagcgccttcagaaagctttgatgtatcccactccagcagctgtgatgtaaatagtccgtcaggcagattgaactgaaattgccagcttttattcgagcgctgattatcgccaataaagagttccttctcaggagacaccctctgatctctgatcaccgttccatccgataacaccaatcgggcgtttttgactaagaagtcatcacggttttcagccgtatcaaacggagacaccttcgaacctgaacgtatcgtaatacgctgcagctgcttccctttccgaagcagtgtctctggcaatggaacagaataggtgcggtatttatttgttgtatcatcgaacaccttcagcactttgccttccatcgttaccgcgtttttaaaataaaggttcgttttcctcgtatcgaatgcaaaatatacttctttttccatcgcgggctctgtcacttgttttttcccgtcaatccacagcttaatgctgtcagctcgcccttctgtcgtggctttgagaaattgagttcccgacagcgtgtctctgttttcaatattcatccgcagaccgtgcgccttgcttgtttgtttaatatcaatcattttgaccggcgttctcgcttcattgatcccgtccccggccgccacataatactctagctgatccttcccgatcaattcaggcgaatacacaatataatggaagagattatcgttgcggtctttttcagcaagaattcgcttaaacggtttgttctcatccgtccggtagtaaaaggccgctgttttcactaggcttcggtcccgtatgtcagcccgcagctcaatgctttcagcagggcggacaggcttgcggtcagtccaatcctcaatgaccggcttttctttatcgagcttgattttccgtttctgctcgggcacctgtgcctgtaatacggttccgggagacggattcttttctccgattgaaatgttcagaagttctgcggttccgttcaacggatacttataaagcactgatgacagccggcgcagcgcatgtttccgataatgcgcaaccgaaatgtcctttcctgtattcgttgatatcacaacggcccgcggcctcgtattggccataccctctgtctcgtctatcaccgcgagattttttccttccgttaattgtgtctggtaatatcgattgaaatcctccgccgtcaattctggatgcccggcaggcttcagccagacgacaaacgtttcgccggatggtatcaagatcctttcatcaggtctccaaatcagatcggagtcaggcccttcttttgggtagcggtaacggatatggtagtctttaaaatcaatcgttctgtcagtcgtattaaaaatctcaataaattcataaccgtctgcgcgtcctatattcttcgtatcaaccgccagctctgtgatcagaagctccggaatatgggcaaggtcagcctggtatccttcaagcttcagtttcttcgtctccgactcaacccgctgcttcccattcgacatcacaatgtaatactcaagctcgctgttccaaatcaaacgtttcggaatttgtgccaaaaacttgcggaccgctccgggggtcgggtccatcggcaccattttgtagcccagctcattactttgtttataaaaaagaaaggcggaaaatgcttgatacgaattatcgcgaacttgagcctcaatcattagattgcttctcatttcagctttcacatcaatttgaggaggattttcaagcaagggtatgtaatgaggcgtctgaaatggttcctgctgaacaacaggaaaagctttcgattcatgatggccgccagacaaaacggaaagaaaagacaataatatagaagcaataaccgtgtatttcctcatcaaagcacctcccttttcatgtattttgcgtctgaacagggaagcttatgagttcatttttgtgcataaagaacaaaaaaacgtctgtctcttgaaaattccactattacctagtaaactaaggatagttaaccagttaacaattaaatcagagaggcaaattgatggacaacagcattcatgatgaattatttcaagctatacaacaattcgcattaaaaagggataaacgcgtctggcaaaaggtgcagataccatccattggcatatcctcacaacatcacgatcacctcaaaaaagactggactttgacccagcttcacattgtttcctgcatacataccagccaaaatgtgaacaacagcttcttagcatcccgtttacacatctcaaaagccgctgtttcaaaagcggttcatgctttgttgaaacacaatatcattacagtgacaaaaaagcctggcaacaaaaaagaaattttttatacgctaactgatagcggcaaagaactggcggggttacatgaacggcttcatcaaaaagcaaaggagcaatacaaacagctcttcaatgaattttcaattgatgagttgaaaacagtgactgcgtttattaacttgtggatcaagcatatgtaaaaaagcctcacccgcacgggagagacctttccatattattaagccctgtcaaatacaatatgaagtgagacgggtccgcgtgtatacagaccggactcagcataacaaaaatcttcctctaatctgatattccgcatcttatccagcacaatattagctacaatttcgatttcggttttggcaaaagctgctcctacacagttatgaatgccggatccgaaagcgagatgccgggcggcgccgctaaaagcgctcttgatgccaagatcttcccgatgaatattaaacacgtcaggctgttcaaatgcttcagggtcccggttagccgcaccgatcatacaaaaaacaatcgtatcttttttgatttccataccgccgaccactgtatcttgggacagctgccgcggaatcagctgaaccggcggtttataacgcaatgtctccgcaatggctctcggaactaacgaacggtcagccaaaacatcattcatctgctcaggattgttgagcaaatggtagatcatcagtgccagcgtcttatcagccggttccgttgcggctaacagcacattaagaatcagtgcgagtatatccttgtccgacatcgccatgccttcatattcagaagtacataggatggaaattaaatctgatcccggattgacgcgacgttcttcaatgaccggcatcaagtattgggaaagctgttcgctgcaccataacgaatgtgcccgcgcttcaggagattgagagatactcgtgataaaatcggcaactccgctatgccactcagagattttttcatggtctcttttatccagcccgagcatgtccatcgtgacgcacaccgcaaacgtctttccaaaatcattgacgagatcaattttccctctttcaagataaggcgctaacaagttttctgcattttgtttaatcaatggagacagatgatccagtgcgtcaccgatgaagcttctcactacaattcttcttttggcagagtgttcttttccatgcatttgggccagcacagggcctcgcattactggttcggcacgctcaacaagtgatttcgtcgtgaaaatatccggatgctgaaggatatagcggacatcatgatagcggctgataaaataactgtctatcgactcttcataatgaaccggatcttcctcccgcagttgtgaaaaataagcatatggattgttttgaaattgatcagaaagcacactaaacaatttaatcgattggctcatgttttactccccctatcatccttcacatgtgatccgtttctcagaaagcatctgcgccatttcctgtacaatgagatacccgtgattcgaccgcatacaaatagaaaattcatggttactgatcttctcaccgagcttccacggacgatgataagcaaggagcgtctcttccacctctaaaatatccggagctccgataaaaaacggcagctcagctatgacatattccacagccaaattcagcatatcctcactgacttcttccatcatcaaactgacgccccgtgcacgcccgattatcgcttcacgagacatgtccaaacaagcatgtcgaaaatgaggctgctcaaaaaaagcatgttcaacttcttgtctcaacagctggtaggctttgttatccataaaatcagaaaatgtatgaatcgccttcggatccccgccatgagccacaagggctctttctgcaaatctcctgtttcgtgatacctctttccttacttttcgttcagcctttcctctcggagttccaagcgcttctagaagattagccgcctcatgccctgcaagtaaaactgaaacgcttttaaattgagctttcgcccatccaattaatctgtaaatataatcctctgaaaacctgctgttaaatgggctgatccccaccaaaacatgcctgcgccgttcaaatatttctctgcagttttctgttaatgcctcagcaataaaatgcacagaccttctttccgttaccattccggtcatctcattcacccctaaaacttatcccgctttaagtcatcaccctcaaatacaagatggaatagctagaacaactgaacaagacgaatggcaggcagcacttaaagtttccaaatgttttttaaaattttaattactatttccatttcacatatcatgataaatgtttactagtaaacattagtcattttatcccttttccttccaaacgtcaatatgatctgtgcccaaatatttgaaaataaatgtaaacatcacattttccacacactttttacacgcatattcagcatgacagatcaacaaatagtctaaacaccaacaattgacaacgaaaacaagaaaagataaaatgaaattgttcaccagtaaacaatttgttttattgtttcatcgtaaactattattactaagaaagaaggtagcctatgtctgatttgacaaaacagatgatatacgacatatacgtgagactgctgcaccttaatgaacaaaaagcgaatacttcacttcagcaattttttaaggaagccgcagaagaggatgtgattgatatccctaaaaacatgacaagcatacatgtcattgactgtatcggccaacatgaacccattaataatgccggaattgccagaaaaatgaacttatcgaaagcgaatgtaacgaaaatcagcacaaaactgatcaaggaagaattcattaacagctatcagctgacagataacaaaaaagaagtttattttaaattaacccgtaaaggcagacggattttcgacttacatgagaaactgcataaaaaaaaggagctggctttttaccaattcctcgattcattttcacaagaagaacaaaaggctgtattgaagtttctagagcagttgacgtcaacacttgaagcagaacaaaccgatgggactccggacaaacctgtaaagtaaacaaaaaggcggtgtacactttggctcatacaaaatcaaaggcagtattgatcttatacactgtttgcttcagtgcattttttgcatctttaagccagaacatttattcacctattcttccgatcattaaagaatcattccatgtttccacagctatggtgaacctgtcagtctcagtttttatgattgtgacagcaataatgcaaattatattaggagcgatcattgattttaaaggcgctcggatcgtcttgattaccggtattctggcaacggcagcagccagcatcggctgtgcggtgactactgactttactttgtttctgatattcagaatgatacaggcagccggttccgcagcactgcctcttattgctgccacaacgatcggacagctgtttacaggcaatgaacgcgggagtgcaatgggaacgtatcaaatgctcctgtctgtcgcaccggctattgccccagttctaggaggattcataggcggagcagccggatacgaagggattttttggatacttgcggccatctctatcgttttgctggtgacaaacagcatcacctttcctaaagattctccaactgaatctatgcagcaagccaaaggcaatgtgttcgctcattataaatcaatatttacaaatcgaacagggaacgtcattttgactttaagttttgttctctttttcatttattttgcagtaattgtctacctcccaatattgctgacagagcattaccatatagatgtgggtatagcaggactgttatatttgccgctggcgctgagcacgattgcaggtacgtttctgtttaaaagaatacaggcaaaaatcgggctgcacaccttgtttatcggaagcaatgtgattgccgcctgcagcatcattttatttgctgttacacattccgtttctctcgttctcatggctctgacgctggcactgtttggcatctcgatgggggttattcctcccttgtactctacaatgattactaatgaatttgagcacaacagagggagtgcaatcggaatgtttaactttatccgatatacaggcatggcagcaggtccgatggtatctgcctacttgctcacaatgatgccgtctgccatgtcctttagcctcctaggccttggatttgccgcattgagcttttgccttcttccgccaatgttttcgccgcagaagcgcacgaaacaaaaaaagcaccacatgtaaaaaagctgcctttgcgggcagctttttttatttttttctaagcggctctaaaatgcctttttgaatcagcaaatggaagaccgacaggataacggatgcccatatcgctgtgccgaagccgtcgatttgaaagctgtcacccataatggacgcggtcatcataagcgtgatggcgttaatcacaaacaagaagagtccaagcgtcaccatggtgaccggcagtgtaaatataattaaaagcggtttaatcagcacgtttaagatcgataaaatgaggctggcgataatcgctgccccaatgctgctgatatggatggagtcaatatatccatcaatgacgattaataacaatgcattgactaaaatgctgactgcccattttaccatgtcatttcatatccctttctgacgggacgataaaaatccaaatgatataaatgagcaaaaccggcaagacacttgtcataatggctaagatgacagttatgactctgaggagtgatgcgtcccaattgaaatattccgcgagacctccgataacaccggcgattttcttatttttttctgagcgataaagcttattcattcgatcacctctgtgagtactttagtttgatggcgcctgttagtgattctgagaagacggtgatgttttgatcatgtgcctgatttgaagtgaacatcatttctttttgaatcgtatcatttttttccttcagcatctctacatccattaattcatgggacagcgtaccaagattgcttttcagctctgccttcactgcgagatcgtccggaattgcaagctctacatttccagtcgttgtttttgcataaatggagcggcagtctgattctgttacgttaatcgcaatatttccgttaaagctttgaacgtcaatggattcgcttttccctcggagatcgatcaatccgttaatggtttccgcttctatcgtaccgcagctgtggcttgcgagcttaatttgcccgttggccgtttcagctatggctttttcggctgttaaatacgagaacgacagcacgccgtttgtcgttttcgctgagaactcttttacatgtaaatgttcccctctgaccggaccgttaaacagcttcacccgaatcttatcatactccttctgaggaatatacaaagtgacattcgttttcatcgtctttttctcagtacggataaaaaacttattacctttgatttcacattcaatatgctgaagaaatgcgtgtctcgccgcatcctggttgtcagcgcgatataccttcgcctggcattccgctctgatatcgtcatcttcccaagggacgatatttacgctgccattggcaatttgcagctcaacactggaaaagtcagtatctttaaattgaaaaatgtgctgaacatcatacgcatggccaaagtttaaatcaaggtcaacttccttgacctttttcacagcagaatcaatccagtcaaacagcttggctcctaaagacggtttaccgctttctttttttgccgttgtaaatggctcttcctcgtcatgaacgtgaactgagagcgctgtgattttctcttctttttccttgtagtcgctgtcaagcttttcaatcagtgtcaaagcttcttgtgctgtaagctttccttcctcaacaagcttaaggattcgttccttttcttgcttcattacgatctcctccccattgtctacttatgctgcacgcaggaccttaatgccctgaatcacattccaaatgataatgccaatgacaactaagaaataaataaccgctcccccgatgattacaaatacaggaagcaagctgtctccatcaatcgcaacggctccgccaagtaaagcaataaaaaggaacagccagccgacaaacggaacaatgtgagaaataagagagcgtatcgcatggcgttttgtttctttctcatttacaacaaaatatgcgacaatcggcacaatgattggcgcaatgaacacactgaaataacaaagtgatgcaataatagcttgattacggttcaattcattccacactcctattgtgaattgtccatgacaaaagatcagggacgttttacttatttatacgtttaaaatctcttcaggtttcaaattcattctttagacatgctccgatttacggaaattggattttaaaaagttttagaagtagaatcttccggctataccgattacaatatgtaaaaagcttacggcaaccaaggaggctggacaagcaatggagaaagatcccagtgactatacagtaacacaagaatcagtgttaaagctgattcaggaacaaaaaagaatgaatcgtgaaatgatcaccgagcttgagcagattcacggacccttcccgatctctcacgatatccaatatataaaagtgctgctcgacagcagcaacacacatattgttcaagatttaatgagtgtaagtaagcagctgtataagaagactttgtaattgcggaaaacatatcattcattataactgaaacaaagctaaaggttagatgacaatatcttgccttttttgttttgaaaaaacaagtgattccctggctgtcacaaaatgattgtaacaaaaaaaagcctgccggcacatccagttaatggactctgtcggcaagctgtaactatcagaaagagatagccgttcaaaattaacgtaacaattgaagcacgttttgcggctgttggtttgcttgagcaagcatcgcttgagaagcttgagaaagaatgttgttctttgtgaaatcgctcatttctttcgccatgtcaacgtcacggatgcgagactcagcagctgttaagttttcagaagaagcaccaaggttgttgattgtgtgctctagacggttttgtaccgcaccaagtttagcacgttggtttgaaacacttgtaattgcactatcgattttaacaatctcagtgtcaaaactaaaatcatctgctgaaacatcgataccttttactcctaaagttgttgcatccatgttaccaattgtaacattaatattttggccagcatttgcaccaatttggaatgtaaatcctgctgtttcactaccgtctaaaagtttttttccgttaaattcagtacgttgagaaattccatcgatctcttcagttaaagcatccatttcatctttaattgcagttaaatcttcagtttgctgtgtacctgtgtttcctgcttgaacagtaagttcacgcatacgttgaaggattgcatgggtttcagtcaatgcaccctcagctgtttggataagagaaattccgtcttgagagtttttagaagccatttcaagacctctgatttgtcctctcattttttcagagatcgctagacccgcagcgtcatctcccgcacggttgatgcgaagacctgaagaaagtttctccatgttttttgagctcgcactgttgtttgaagacaaacggtttagtgtgttaagcgctgcaatattgtggttgattctcatgtgaaaaatacctccatgtgtatatgtttttgaaatcaaagacttccttttctttgatttctggcgtatcagattccaataaagcttctaacctatgtagattcagttattgcttaaggatgcctttaagccccttaatagggtttgtctgcttaatttggaaatcatcatccgcctttcaattcatatatcgacagccatttgtaaatgtttaggcgttttcccaaagaaattataccaaagacgaatctaaacctattatgccgtaaagaaaaagcttgcctgctaagcccaaggatggacttgctgacaagctgtcccctcttaacagaggtttttttaagatgtagctgtttcttttgctttcaagagcgatttcatgcgtgttttgtcacgttcgataacaggcttcaaataacggcctgtatacgattcttccacttcagtgatttcctcaggcgttcctgacgcgacaatggttccgcccccggctccgccttccggtcccaaatccacaatgtaatcggccgtcttaatgatatcaaggttgtgctcaataaccagtacagtgtctccgttgtctaccaaccgttgcagcacgacaagaagcctggcgatatcgtcgacatgcaaacctgtcgtcggctcatctaaaatgtagagcgtgcgtccggttgagcgtttgtgcagctctgacgcgagcttcacgcgctgcgcttctccgcctgacaaggtcgtcgccggctggccgagcgtaatataacctaaaccaacatcataaagggtttggagcttgcgtttgattttcgggatattttcaaagaaagaaagagcatcttcaaccgtcatatcaagcacatcagagatgctttttcctttgtacgtcacttcaagcgtttcacggttatagcgtttgccgtgacacacctcgcatggaacgtatacgtcaggaaggaagtgcatttcaattttaataatcccgtctccgcggcaggcttcacatcgtccgcccttcacgttgaagctgaaacggccttttttatagccgcggaccttcgcttcatttgtctgcgcgaatacatcacgaatgtcatcaaatacaccggtgtatgtcgcagggttggatctcggcgttcttccgattggcgcctggtcaatgtcaatgactttatctaaatgatccaaacctttaatctctttatggctgccgggcttcgctttcgctttatgaagcttttgcgccagcgccttatgcaaaatttcattaacgagtgtactctttcctgaaccggaaacacctgtaactgctgtaaacgtcccaagcgggaacttggcattcacttttttcaggttgttttctgaagcacctttaatttcaatgtaacgtccgtccggctttcttctttcaggaggtaatgggataaactttttccctgataaatagctgcccgttaatgagtttggatcttccatcacttcttccggtgtacccgcagatatcacctgtccgccgtgaatgccggctcccggtccaatatctattaaataatctgctgccatcatcgtgtcctcatcatgttcgacaacaatcagcgtgttcccgagttctctcatatttttcagagcgctgatcaagcggtcgttatcacgctgatgcagaccgatagacggctcatctaaaatataaagcacaccggataagcgcgagccaatttgagtcgccagcctgatgcgctgcgcctctcccccggacaatgtacccgctgccctgctcaatgtcaggtaatcgaggccgactttgtccagaaagcttaagcgctccacaatttcgcgcaaaatcaaattggcgatctgcatatccttctcagaaagggtaaggtctttaaagaaggcaagtgcgtcggcgacagacagctcggtaatttttccaatgtggcggccgtcaatcagtacggcaagcgcctctttctttaaccgatagcctttgcacgtcggacaagatttctgagacatatactgctccatttgctcacggatgaaatcagagcctgtctccttatagcgtctttcaatgttgcgcaatacgccttcaaattgaatttcaccttcgcgtatttgtccaaaatcattttcatatcggaaataaatcaggtcatccccgctgccgtacagcactttatccagttgatgcttcggcaaatctttgaccggcacatccatatcaatcccgtagtgggtgcagactgcctcaagcagctgaggataatattgtgagctgatcggtgtccaaggggcgaccgcattctccttcaatgacaaatcttgattggggatgacaagatcggcatccacttcaagcttcattccgagaccgtcacacgtcggacacgccccgaacggactgttaaacgaaaacagacgcggctcaagttcaccaattgaaaatccgcagtgcggacaggcataatgctcgctgaacatcagctcttcctcaccgatgacatcgatcataacccgtccttcacctaaacgaagcgccgtttccaatgaatctgacagccgggctgccacgccttctttcacgacaatccggtcaatgactacctcaatggaatgcttcttgttcttttctaattcgatatcgtcggaaagctcagccatctcgccgtcaattctgactctgacatagccttgtttcctaatctgttcaagcactttgacatgagcgccttttcggcccgagacaatcggcgccagcacctgaagcttcgttcgttccgggtattccagaattctgtccaccatttgctcgatggtctgggatgtaatctcaattccgtgttccggacaatgaggcttccctactctcgcatataaaagacgcagataatcataaatctcagttaccgtaccgacagtagacctcggattgcggctcgttgttttctgatcaatgctgatggcgggagagagccctcaattgcatccacatcaggcttatccatttgccctaaaaactggcgggcataagcagacagcgactcgacataccgtctctgtccttcagcatatatcgtgtcaaaggcaagggaggatttacctgatccggacaaacccgtgacaacgacaagctgatctctcggaatcgttacatctatatttttcaggttatgcgccctggctcccttcacctctatccgatccatagccatttgttcatcatccttccgcttttagctctaaaagtaaatcgcgaagctccgcggctctctcaaagtcaagcgccttggcggcttccttcatttcatgctccatctgttcaacgactttctggcgttctttcttcgtcattttcgacagcttcggcgcggcttttgttttgtattccgctttatcctcagctgctactgtggcacgaatgacatcgcgaatttctttatttatcgttttcggcgtaatgccgtgctcttcgttaaaccgctcctgctgctcgcggcggcgttttgtttcattaatcgcaatttccatagacttcgttattttatcggcgtacataatgacgcggccttccgcatttctcgctgcccgtccgatggtctggatcagcgaccgctctgaacgaaggaaaccttccttatccgcatccaaaatcgcaacaagggatacttcgggaatgtccaaaccttccctcagcaggttgatgccgacaagcacatcgtacttgccaaggcgcaggtcgcggataatttcaatccgttcaagcgtcttgatctcagaatgcagatagtttactttaatgccgatttcttttaaataatcggtcagatcctctgacatcttcttcgtcaaagttgtcacaagcacccgttcattccgctcgattctagcttgaatttcgccgatcaagtcgtcaatctgaccttcgattggacggacgtcaataagcgggtcaagaagccccgtcggacgaatgatctgttcgaccatttcatctgtatgttcaatctcgtacggccctggtgttgctgatacatacacgatattgtgcatatgcttttcaaattcctcaaaacgaagcggacggttatcaagcgctgatggaagccggaagccgtgatccacgagcacctgtttccgcgcctggtctccgttaaacatgccgcgcacctgaggaattgtcacatgcgactcatccaccacgatcataaaatcgtctgggaaataatcaagaagcgtatacggcgttgaacctggaggccgcagcgtcaaatgtcttgaatagttctcgatgccggagcagaaacccatttcacgcatcatttcaagatcatatcttgtccgctgctctaaacgctgcgcttcaaggagctttccgttttcatgcatgaccttcagctgctcctcaagctccttctcgatattttgaatcgccttctccattttctcggcccgcgttacgaagtgggatgccgggaaaatcgcaacatgatctcggtcgccgagaatttctcctgtcagcgcatccacttcccgaatccgttcgatttcgtcaccgaaaaattcaactctgatacaatgctcatcacgggatgccggaaagatttccactacatccccgcgcacacgaaatgtaccgcgctgaaagtcgatatcgttgcgggcatattggatgtctacaagttttctgagcagctcgttgcgctcaatttccatttcagtccgcagtgacacgaccatttcccggtattcctcaggcgaaccgaggccgtatatacaagacacactcgcaataataatgacatctctgcgctcaaacaaagctgatgtggcggagtgtctcagtttatcaatttcatcattaatactagcgtctttctctataaatgtatccgtttgaggcacatacgcctccggctgataataatcatagtagctgacaaaatactcgacagcattgttcggaaaaaattccttgaactcactgtaaagctgtccagcaagggttttgttatgggcaatcacgagagtcggcttattgacttctttaatcaaattagacaccgtaaatgttttcccagttcctgtcgcacccagcagagtctgatgcttcttgccctcctgaattccttttacaagcttttcaatggctttcggctgatctccttggggctgatatttcgagactaactcaaagcgatctttcacaaaaataagcctccgtttctttaacgaaatcttcctatagatatagtaacacaatggaaagcaaaatcactaaaaatacgaactaaagttcggtggttttttatttccagctgtttttgtgtataaaaaacctgcttttaaaacgtaaaagcaggtattcagtctttatattcattatgtccgatttattcttcttttttctctgcagcttttttggccatatacagtccgccagccacaagagacacaacatccaatcctacaataaaatacgtttctgtatagccttttaaataagaggcaaacagcaatgcagctgttaaagcgatcgccacataatgattaaaggtgactctagtaaatagaacaacaagcataaaagggaaaaacaatgcaaaaacggcttttgtaatcaacaaaaaccctcctcagggattcttcatctgatctgattatagtaaaaaatgaagaatcggacaatcgtgcattcgctccctctactacaccataccccttttcagccaaaatcaatcactatatttgcattttggtgccggtcaaaacttattccatggtgccgctgttctaatcagcggcactttttttattacatcatcaagtccgccgccagattccgagaataaaagaaaataggcatacagtaccagtacggccgcatttttcaggataatataaccaacttaactattcattttatttaggactttctgcgtttgacagcattttcctgaaaacctacaattaaatgatagtgtttactatcattttttaaacacaggctccgcaataaaaagactagagagaaaaacaaaatgaatgaagaaaagaggggtttcaaatatgtattctgttttatttcgccaggcagaagagtccagccagctggctggagcaaaaggaatgaatttgattaaattgaccaaacacggtcttcctgttccggacgggtttattattcaaacgaatgcgatcgcacgttttatggaggacaaccagcttcaagagactagtgaaaacgtcgaaggcgggatcatttccggaacattttcggatgagctgaaagatgagctgactagttccttttataagcttagagaatcatatcgatccgtagccgtgcgttcttcgtctgcctcggaagatttagaaggcgcctcattcgcgggtcaatatgaaacctacttaaatatcaaaacagaggaagaatttctggctaaagtgaaagaatgctgggcttcatttttttctgggcgggtcagcagctataagaaaaaaatgaacaatcaaatcgcagagccgttaatgggtatagtcgttcaggggctgatcgattcagaaatgtcaggtgttatcttcagccgcaatcctgttacccatgatgatagagagcttttaatcagcgccagctacgggttgggtgaagctgttgtttcaggaagtgttaccccagacacgttcattgttaaaaaatcttcgtttgagattcaaaaagaaataggtgcaaaggaaatctacatggagtctgcggcagaaggaattgctgaaaaagaaacgagtgaagacatgcgcagccgtttttgccttacagatgaacaagtgattgaattggctgaaatcacaaaaaaaaccgaagacctgtacggatatcctgtcgatatagaatttggaattgctgatcatcaaatataccttctgcaagctcgtccgattacaaccattgatcaggacaaaaaggcggcagaagaaaaacgcagcttcatgattaccgacactgatatgaatgatttctggcttaacatggagtctaatattgaaggtccggtgagtccgttattttcatccttcatcgtgcctgcgttggaatatggcttgaagaagagcatgcaaaagtttccgattggtgtagttgttgatgaagtaaaactttatcgcggacatatttattccaaaaaccaaggagggcagcagcctccttctgaagactgcggcaaagagcttttcccgattttatcggagcatatgtatgacatcattaatcacacatacctccctttttaccggacactggaccagctcgcacaaactgagcataccgcagaaagcgcactggatgcttttcaaaaactaaaggccttttatctcacggcttatgaagagcacttcaatatcgttttcccgcaaatccttttaacaaacaaactgcaagcgatgtatcaggacattcaaggagagtccgaaaacgctcatttttacgagatgctgacaggaaaaatgaacaaatcactggaaacggaccgttgcttatggctattttctgtggaagttcaggagaacccgaaccttctggccatttttgaaaacaacaagcctgaacaactccaggagaaattggaacaaacagatgagggaagacacttcctgaagaacgtccatgaattcttgcaagaatacggatggagatctgttaaaagtcatgatctgattgaacaaatctgggtggaaaatccgtatttcgctctggccaatattcaaaattatgtccgtaatggctatcattttgacaatgaatttcagaaaacgaaagaaaaacgagagaaattatacaatgaattcttggaaaacatagaagatcccggtttacgcaccgaatttgaccgctattatcaatggacactgaactctgcaaatataaaagatgatcaccacttttatattgacgccatgctggatgccaaggcgagaatctttctgctgaagataggtgaattgctggcggaaaacggtgtcattcaagatcgtgaggacctttggttcttatatgatgacgaagtggaacaagcgcttcttcaccctgtatccctgcaagaaaaggctgaaaaacgcagacagatttttcatgagtatgagctggcccaagccccggcctacctcggcaccccgacaaaagaacagctcaaagcagctgaagaaattgtcggcgctgtgatagaggatgaaaaaaacacagagaatcatatttttggcattgcggcatcaagcggcattgcgacaggtccggtgaaaatcattcgggacgccaatgaattttctcaattcgcgcctggggacgtactcgtttgcaagatgaccacaccgctatggaccagcctgtttcaagacgccaaagcgataattacagacacaggcggcattttgtctcacgctgcgattattgcccgtgaatacggcattccagccgttctcggcacacgcacggcaaccgaaagactgcgagacggtgacatcatcactgttgacggtagcagcggcaaaatcacagttgtcagccggtcctgatgcgtccccctctttcttatacaagcggggcgggtgtatacttgtcctgccagtatactcgtgaggtgaaacgtattgagaccgacaaacaagagaatccttgatgctgccatgcagctgctcgtcaaaaaaggatatcgcgcaacaactacaaaagaaattgcagaaaaagcaaatgtaagtgaagcgacgattttcaggaactttaaaaacaaacaaggactagttgaggctttgctttctcagcattcttcaaacagaggcagcattttggaacaaacagaaggggatttgtacaaagacctgcttcatatcggaacctgtctcttggaggagctcgaacatagaaaagatatcattaaaatcagctttcgtgaaccggccatgtttcaggatgtcattaaccacgtcactgaatatccccaatctatgaaacagctattggttgattatctcaaaacaatgggtgagaaaggggttattcagacaggaaatgaagcggagcatgccgacgtgttcatgtcgattatcttcggttatttcattcaccgtctccacttaggagaccgggtcatatcaatgccccaggaaaaaatgctggagcacagcacagctctatttgtcaaaggaatttctgctgattaactccttggcataataaaaaggaggatcccaatgagctcaagaaaagaatgggcgctgatcgtctcgctattattgggggccattctggttcccattaactcaacgatgatcgcggtcgcgctctcatctatttcccatacgtataacgagtccatcgcaagcatcacttgggtggttaccgtttatttaatcgtgatggcagtcacacagccgattgcaggaaagctcggtgacatgtacggcaataaaacaatgtacttatggggagtcggcctttttctaatcgcatctctaggctgcgccctttcaccgagtctgctcctgttaattgtctttcgggcattgcaggctgtcggcggggcattgcttacgccaaacagcattgccattatccggcatgttgtttctgaaaaacgcctaccgaaagtgtttggatttttcggactgggtgcgggacttggtgcagcactcgggccttttatcggctctatactgattgacagcttcagctggcattcgattttttgggtcaacatcccgttcctcgccattgctttatttacggcattaacgatgtttcctcaatataaagaaaataaatctgacgcgccgctggatatcatcggctctctcttgcttgcaggcagcatcgtttccattatcctgctgacgaaaaatgaggctccatggggatatgcggtatacagtgtattgatacttctttttgttccgctttttttcagaagagaaatacgtacccagcaccccatcattgactttgcactgtttaaaagctcaacctttacaaatgcgaatctatcagtcttgttaagcaatttgatgatgtatgccgtcttattgattatgccgttatttatgacgaaccaatttgggcttaatacgtctaacagcgggatggcgctttctgtattttcgatcttcatgtcagccagcaactgggtgggcgcgcagctccatcacaaatggggagccaaaaaaatcatttttctttcatttgccatgatggctggtgcgaatctattatttttgctgttaagcagctcgcattctgtcttattcctcatgctctctcttatccttggcgggctcgcttccggagtcggtctgaccagcatgcaggtgtcatcccttgccacagtagaccccggaatgtcaggagtggcatccgggattttctcgaccttccgttatttcggaagcatcatttcatcagccttaattggcctgatttcgggatatcacatcctatttatgattctctttgctgtatccatcatcggcgtttttgtttcattgggcatcaaatctgatgaaacggcacggatagaaaaaaactcagcgtaacgcaaaacagcccggcatcgcatcttcctgcggtgccgggctgccttttatgatccagaagcggctgcttcgtcttcacggtcatcctttacgaagaggatgcccaattcatgatgttctccttcataagaagctcgctggtcaaaacggatttctccattcaaaccgataatttcaagctttacatatgcacggttatgctgaagcgcttcatagaaatcagaaacgttcttaaccggtatgccattgactttcgttatgatttccccgattttcaattccagatcctcagccggcgtattggggataatcccaagcaccattaagccctgatcccttttcgagaaataaaacggagccgcgttatcattcactctttgctttatggacaaaaaaatgcgccctaacaaagcagtacagaccgctgcacccgcaagcggcgtccacagtaagctcgctgcaccgagaactgcgacggcaagaccgagaatacaaacgcgtttcgctgtgatccttatactcgtttcaggcagcgatccctgtaccctttgtccaaatccgacaaagtaaggaatccatagaaaatgaaatgagccgccgggaacagtaaacacgggccaccagctaaggtgcgattctaaaccattgccgggcacgagaaggaacagcggcaaaagccaaacccggtttgccagctgctgtccgatcggcaaaccgcggctgcttacgacaagtgccggtgatgttctcacatgcgcagaacgataagcaaccgctccttcagtgataatcagcaaacctagaaacacagccacagccggccaaacaactgcaaatccttgctgaaatctctccagaaagggctccgcctgatatatttgcagtccaaaacctatcagcatactcacactgacgatatatgcagcagacatccagtttgcgcgaagagtgaacgctgccgctgcagtgataacggcaataatcgcaagtaaaccgagaggaatcgatattccgagtccacctaaaataactgacaaaagaagacctggaatcagtccctttgtatatgtaaatttcagatcatcataaatatctgctattcttgtatgaaaggtttttcgttcccgtttgattcttacatagccgaaagccagggttatgatgataaaaaaccagaaaagcgggtgtaagaagaacaagcccgcgctttttaacagttcaattccccattgaacagacactatctctcaccgcctcaagccaaacatgttactcatattctatcaaatattaaatggcttggatatcctcaggagagtttatctctcttgcgtcatccacagcgtgacattcgatagtgaaaaatcctttaaatagtggtttacatccacatccaataacccgctgattagatgcatcgacctttttatatctgtcagattaattcctaatcgcttatggtttttcattaagtagttaaaataatgtttggcgcattcctcattaatgtcatttactgattcgacattggtgtaattgaccaaatatctgctgaacagcataagaagacttagtgcttttgtagctgaaaatgttacgtcttgtgttctgtcttttaattgttccactaattcataatattttttttcacgcacaatacttgccctcttcaattgtgaacccccattttctttatacagataagcacgggccagtataagcagcagtactggagtgctaacaagcattctcgctaacgttactctttaaatacctgtcgttcagctgccattaacctgattactgttctttttagaaccttcttatattgtatgaagtaaacaaagactaggcaacttgcaaaagtttcattttaaatgcatattaactcgttagaaagtctctctcatatattgatatcgggtaataacagtcctttataaatgtttatttgtgaaaatttttttaatttcttgtcaaaaactcattttttatgtgacttatgatccataatctctttaagtacaaagaaacaggagatggaataccatctcctttaattgacaaataatgatttcaatgctgtttgaagctgcaaatcatttttgtcatctgattttttcttttctatctgctgatttaatgtctctgcagtgcgagtgtcgatcacaccggttttattcagcttgttttgatcctgaaaagccataaccgcttttttcatgtctttgctgaaatagccatcctcacgtcccggatcaaagctgagaccttttaacaatacctgcgcatgcttgacgtcttcattgttcatgtccactttaagcggctctttcagctgtaaaggcccagcggaaaaataatcgggctgcttaatcgcaatggtcggttcaattcctttcttatgaatccaatttccatttggcgtcagccacttgtaaagcgttaatttgatgttgctgccgtcccccattggcacagcctgttgaaccgttccctttccaaaagacgtatcgcctacaacatcataatggccagcttcctttaatgcgccggcaagaatttctgatgcagaggcacttcctttatccgtaatcacattgacagggtacgcttttttatgggtcaatgttgaaaaataacgttttttatccccattgcgttcagcaatctgaatatacggctgatcctttgtaacgaaatgcttaagaatttcttccacactttgaagatatccgcccgggttgccgcgtacatcaatgacaagtccttttatttcttttttctcaagctccctcagcgcttttgcaaaatcctctgcggtgtgctcagaaaaagtagagatggcaatatatccgacagaatgcccctgtacttttttctctgatgcaaaaaccgtttcgagcggaatctcagctctcttgatccggaatgacagctgcttcttcgttccaggccgctgaatcttcattgaaacgctggaccctttttttcctcttatttttaacacagcgtggtttaaatccttgccggccatcgattctccattgatgctgataatttcatcattaggcttcaacccggctttttccgctggcgatttcttgaatggagaaacaataataattttgccgtcttccattccaacctcagccccgatgccttcaaatgaggaatcaagagaatcagaaaattgcttagctgtctgcttgtccatgtaaacagaataaggatcatttagcgtagacagcattccctggatggctccctcgagcagcttttctctatctactttttctacgtactcattcgatattaactcatacgctttttcgattttgtccatagctttatcccgttcagagtcagcttgtgccgtcgcgggaactgctgcagtctggggcttatccatctcaagcaggttgattcccgcatatacaccgacgcctccgaacagcatgctccctgctgctatcacagccattattttttgattcatcctttactcctcctgtatgccagactgtctttaccaaaacctagagatagtatatgtaaaggatggagatttcatgtaatcatagaagaaaaagaaggcaaatgaaaagccgtcccgaaaacggaacggctttttcactttatactcgcaaaaacttgcggatggaagtcagacttccccatactccaattactgcgccgattgcaatcagcactagcgaaacttggaatacaaatggattataaggaagaagagagacaaatgatccttgaacctttggaacgacccatccgatgacgtattggtaagtgctcagcaccagtgcaatcggaatcacagaaccgaatacgcctagcagcaatccttcaaggaaaaacggccagcggataaaccagtttgtcgcgccgacaagcttcatgatttcaatttcttttcttcttgcgaaaattgtaattttaatggtgttggaaattaagaacatcgccgtaaataccaggccgataattaacgcgattccgatgttgcgggaaacgccgaccactttaaacaaacggctgacctcttcttttccataagtgactttataaacatgatccattttttcgatctttttcgccacgttcggcgtatcatgcggatctgtcgttttgacgacaaacgcatcattaagcgggttttcctgatccttcattgtcagggattttccgctgtcaccaaaactgtcaaccagctggtcaagctctttttctttagatgaaaaagtgacactctgaatgcccttcagttccttaatatcgttctgaagcttgtcctgtgccttctgatctgcagtcagatcaaccagcactttgatttcgacttgtttttctgctttcgtggccatgttattcaaattcagcataatcactaaaaacacgccgactaaaatcagcgtaacggttacagcactaatggatgcaaatgtcatccatgtgtttctcccgagagatttaaaactctcacgcaagtggcgcccgagaattttaatcatatgaaccatactcccctcttgactcatcacgcacaatgataccatcttcgattgcaatgacacgtttcttcatggtgtttacgatttctttattatgtgtcgccatcacgactgttgtcccgcggttattaacttcctccagcgtcttcatgacttcccaggacgtatccggatcaaggtttcctgtcggttcatcagcaatgacaacatcagggttgttcacaattgatctggcaatagatacacgctgctgctccccgcctgaaagctggtcaggaaattgtcgcgctttatgcttcagctgcacgagatcaagcacttcaagcacccgtttcttaataacagacggctgttctccaatcacttcaagggcaaatgccacattttcaaaaacagtaagtttcggaagaagcttgaaatcctgaaagacaacgcctattttgcggcgcacgaaaggaatctctttttctttaattgtcgcgagatctttatgattgattaaaatttgtccttttgtcggtttttcttctctgtaaatcattttaataaaagtagatttacccgctccgctcggcccaacaacatacacaaactcaccgggatgaatggtaacagaaatcccattgagcgcttttacgccgttcggataggctttatatacttccttcatctctatcatgaaatcacctaatcttttatatcattttatctatcacacggtcatactcttcgaatgcattcgacaatttatgatccattcatttgtaaaaagatgaaaaatctgaaagttccctttttcaatacacttcattatacgtcaaatttagacataatactattacagtttcttttcattcatatttaaagaataaatattcatttgggttggaagtttcgtttattacgaaaactgtttttccatttaaatgaatcaaatccactacttgacaatcattgataaataatataaaatttcgtcaaaattacttttttgtatattaatgttaatatatccataaaaatgaacttggtatcactctcaacttgttatctcatatttacataatctaagtagacacgaactaacagaaaaacatcattaatttatttaaggggtgttataattgaagctaatttacaaggacgaatacggtcctctatattctgaaaagtcaaagaattctatccttaaagagcctacttattttgaagttgattccaaagacaacttaaatagaattgttgataaaaaaggacattacacttatcaaaacaataagcttcataagataaaacctaaaaatataggtgcatctggcagtaatagtggataccctctcattatggataaaaaaggacactccttggaatatggtagagaccttcttgaagtatcaatgagaaataaactttatattaggaccacagaaaaagaatattgttatgagtacgataccgaagttgaaccagatactattcaaatttttgatgacaaagtgcttttgaatttaaaattaagacaaatggttgtacttgtatctacttcaggtaaagttttaaatagctttggtcttgatagatacagaggtgaaggacaaaaacaattaaatgttcccatgttctctgtatatatagaagatagaaattctatattaatttcagatgccattaattcaagagtaattgaagtcgacgaaaatggaaatataatttggaaatatggaaaggatggtttattaggttcggatcaaggactcttatggaaaccaacttgcgcaagaagactttccaatgggcatactattattgcagattccaaaaataaccgattagttactatagatcaagataaaaatattgtaaatgagattgggcaaacaaatgtttctaaattgtttctcacatatcctcgctctgttcaaatgcttgataaatataattggctggtgacaaatacacacaagaattctatctttatcatgaatcaaaatcaaaagaaaatcataaaacccataaatgattcttataacaagttaaatttattttggccaagatgtagtataaaaaactcggatgatgaaataatcatagcggacggaaagaataatagaataatgtttattgacgataaaacattacaaataaaaaaagtaattgattactattatgaacaaggtaatagaatgacaattattgatcctcatgatattaaaataaaccctaaaacaaaccttcttctcattaccttatctggaaacaatagggttatagaaatgactagtgatggcgagttaattgagagctatgataatctaaacgaccctcattctgcttattacttttcaaatgggattattattgctaatacggaagacaacaacatagttatttattatttttccggcaaaaaagaaatcattaataattttaaatctactaattcatgctgtgatgcctttaagagacctcgttatgcgctaccttataaaaatggatttctaatattagatacagacaatcaaagaattatatttttaaaaaaagagaataacgaatggattggagaaaatgtgcctatctattttcctgatggacctataatgaattatctttgttttcctcggtgcattacatttaacaatgataatgaactaatcttaaccgatactgaaaattgtaggattttacgccttgtgattgacgacactcttattaaggaggagcattcaaatgaaatataaagttgattcggcacatggtggtgaaggttgggtacctagaaagcaagatcactctacagaactaggtcatttctggaataactgtggcgtaaagggcgaattcggtaccctgtcacatgttttacttagaagtccaggtctagaggtagaacaaaattttaatcctgctgatatcctatggactgagagaatagaaccatcgaaagcaagagaacagcataataatcttattgaagtttatcgctcccaaggggtagaagtagacttaattgatgataaagcagctgaatcttttccaaatattttgtatgtcagagatttgtttacaatgacagatcaaggagcaatcctatccaggatggcatcagaggttagggctggagaagaagtaattatttctaaaaaactatctgaactcggtatacctattttagcctctcttcactcggatatgatattagaaggtccagacatattaatagtcaatcctgatctagtatttataggttatggtataagaacaaattataaagcagctatgtatgtcaaacagatactattaggattgggatattccgaagttatcatcattcaaactacttatggctgcggacacttggatggtgtagtgaatattttaaattctcggtatgctgccattgttccaaaaagagtttcatatgagttgtacataggattaaagaggcatgggttttcaattattgaacttgacgacatgtatgaaatagatcagttgatgtcaattaatttcgttcagctaaacgaagagactcttctgattaataagggtgccaaaaatacagtgtctcaatatagctcatgtggctttgaatgtctagaaatagacattagtgaattaacaaaaggaggcggctcaattcattgtttaacagggattttaaggaggatttaacgagatgggcgtttctatagtaattccaattaaagttaactcaatcgatgaaatatatattgatttcatcaattacatcattgatttttcttccaatgtattaactaaagacgttgaaataataatagccaatggaagttctaaaaatatttatatatttgctaatgaacatcttaaacatttgaaaaatgttatacattttatcccacatcgttcaattagaacaggagacaacgataaactaaacgggatatactctgctttaatgtacactaagcatgataacattttattagttgatgatcactatagagtatcaagtgaaacgcttgcagatatattaaaatactatgaaaaatatgattgttttaagtttatgcctaaactacatcaatacccacattcagctttaattgatacatgtggaatgtttattgttaatgtattagatagtagaaagcaatattgcggccatttagcctttaaaaaaagtttatatagtgaatggggatttatcaatagagattctctatttgatgagtttgctatggaaaaacatttacgaaaaaagggaagcagagtcggatttataaaagatatcgctctggaagccaaacaagaaattccgtttaaaaaatttcttgagcagagagtacgttatgcttatgaaaacattgctactccctatcgctttacctttttcgccatgatcttaccacttttaatactgttaagcctgatagacacgaactatggtctgaattttgcattttttctaacaagctggacctttgtcatatcaatagtaggtcaattcatttatggtaaacaaatcaccccttggtacacttcactatatagtcctatttggttctggttttatccttttactacgtggatagcaatttacaagtaccttaccggaggaatcatgtttggcgggaataatattaggagggcaggatagatgaaaatcactcaaaagattatagggccacaaagtattgtatacttcaaaaaagataaaaatagagaatttgttgaaaaaatttccactgaacgaggagaagatgaattagttgatcaaattcacttttataaaatgttaccaaaagagattaagcctctttttccagccctatatgattatgatattaaaaacaggccgtttcgcatgtcaatggaattatgtgattttccaacattaaaagagattattttatacaatactaagcaaaacaagttgaaggaacacttatataatgttatacaggacatatttgaaaaaatacacaacttaaaacaaacacaggcaacaaaaaattatgtagaacatttgtatatagatcgttgcgtcaatagaataatagaaacaaagaaattaatgaaagaagcacaatggataaacaacgacttttacttagagggttcaattgtatccaacccaattcaaacggtttttgaaattataaataataataaggatttattaatacctgaatatctatgcactgtacatggacagctaggtccttctcacttaatgttaaacattcaaaagaagaatagttacaaactagttgatccaaagggatttcatgaatttcatgatccattgttggatattataaaaataggtaggtccttcctctatgggatggagtggttagaagatgacttgtataatattaaatattcttttaaaaatgaatatcttacaatagaagattttaatttaattaactatgatgaagtatatatgaagaagtcatttaaacctataatggatttagccataaataattacaaaaatgctgccctaagagtatatgccttaatttgctgtgatctaatagcaaatttaccttttgcatatttatcaggtggtgaaaagagagtagtagctttatataatctcatatatgctgctagtttagatttgtctcaattaaatgatgctgtaaataaggagaaacatatatatgaaagtctttcaaaataacagatataatatatttaattacaaggaaagttctatctttatagaagatagacaaccccattctgttcttacaatagcaaatttaaaaaatcaattagttgtggtgagacaaatgcgaaaaggaataaataatgaaaccgtcgaattgcccgggggacaggttgaagataatgaaaaacctatggacgcagcaaaaagagagctagaggaagaaactggactaatagcaaatcaatttattcaaataggtaatatttatcctctccctagtttaattaatcgccaaatcacatatttttatactgaaaatattgttggttataataagactattaaacaggatgaagatgaaaatatacatgtagaatatcacaaatttccaaaagtcgagtataatcttaaaacccaaaagtggagggatcaatttcttgcttatggagtatatatctgcaaattgaaaggaataatataaaaattttagaggttaaaaatggatgtccaatctatattatttgatcttgataacactttgttaaatagacaaaaaacttttgaaaattatttagattcatttatctccaagtatattttctataactccccgaccgaaaagaaagatataaaaaataaaataatagatatggataaaaagggagaaaaagataaaaaggaattgttttcagaattacaacatagattaaagtggagattaaccccttccgttgattatttagttgaagaatataaaacaatattcgcaaaaaacagtatagttatggatggaacttttgaggttctaacattttgcaagaataaaaatttaaaattagggattataactaatggagaatcattttatcagaagattaaactaaataacacaaaccttacatgtttttttgattttatcttaatctcagaggaattcggtaaagctaagcctcatcgctctatctttaaattcgctattgataagatggccattgatccacgaaaatcaattttcattggagacaatcttatttctgatatttatggtgcttctaggtttggattttatactgtttggtataatcactctaatatagtcaaacaaaatcccataactgtaaaacctaataaaattataactagtttaagtgaattgttgaaaataaaagactggtagccgaaaggagaaaaaagtgattattagtgttgattttctaaatcatttacacagtatttataataaaaataacgatctatccgaaaatgttaaaagaatattcaaagaatataaatgcagtaatatttatgaacacagtgtaagggtagcacatatggcaaaaaaattagctgtacggtttcgagccaatgaagaatcagcatatatagcagccttattacatgatattggaggtattgttcctaatggaaaaagaattgaaattgccaatatactaaaaatccctctttttcctgaagagatagagttcccactaattattcatcaaaaaatctctaaggttattgctgaaaaagtttttttaataagtgaccattctattcttaatgcgatagaatgtcatacaactttaaagtcgaaccctagtatgttggataaaattgtatttatatcagacaaaattgaatgggatcaaaagggttctcctccttacataaatagtctaatagaagccttagatgtttcaattgattgtgcttcaaatgtctatattaagtttcttatggaaaataaaaataatctaaaggttattcacccttggcttagtgactcttataactattttaaaaaataaccctcaactcaatactatatataatattatgtatttaaatccatcaaagttgtgtaaatattggcaagattctcttaagatagccttgtattttttgtttaacactcttagacctaggattaataactgaaatattaatggtctaagagtgttgattatattgaacgattaattaacatgttttatgtcggaaacaaggcattcaatttacactattatctttatttaccttattaaactaatatatattctattcccccccctgattcacatccaatcgaactaagtcttggttgaatgctttaattttattaattctttttataatgaataactataaacaatattattagtgtagaagattaaataatttcatttttattacaatatgaattaataattgtttttcaaaaaattccatgttataatttggtaaaccactgaaatttaaggagggttttatgagtaaagtatttgataaagaagaaatccttaaattgattccgtgttctgacaaaattgactatatatacttagcggggtcaataatggaaggtttcggaaatgatgcttcagatattgatgtttttgttataagtgaaaatccagatagactagcttatgaacctactaattttacaagagaagtaaacatacaagtaggagaatcattcataaaaaatattgttatagacagtattagatatgattttgagtactatcgttcttctagttttacttctttaatagaaaagttgaataatttgaattttaatacagaaaattatattccaaggtttacagcagatgaaatagatcttttacatagattaaaatttgctgagccgcttctgaataaaagtgcttttaatactattctaaacaatataaattttgaaaatttaaataattatttagtaataactaatattgagtcatatgatggacatttagaagacttacagggagctctttcttgttctgattttggtacttcatttgtgcttttaaaattattattaaaatattctcttaatgcttatttagcgaaatatggagagacaaatccaggagaaaaatggttatttagaaaattaagtagatacgccgaaaaacatggtgatcaacatttacttgataagtatcttaatttattatgttatccttttgagaaagataatatcaaacattatgctcaaaaaactattaattttactcaaccattaattatcaaagctcaaaaataaaaacggagggaagtaatcacatgatttatcaaaaaaatatgtttgtgagattccgtatcatcgatactaaaccttatcttattcttaatgacaatgcatttatcttagacgatgtaggcgttaatatttgggaatcaattgatagcaaaaaaaatattgaagaaataataaataaaatctcaaatgtttactcagtagagtctaataaaataactaaagatattaagaattatttaaaagatcttgaaaaaaacggattaattgaagtgtgtaaagaaatctcataggtagttaataatgtctggaatgggctcctttagtggaggtgagattaatgtataaaaagcctgtattaattaaggtgaagcttcctgttgcgttagagtttgtttaattactacttaactgattgacctatcttttatgaattgaggtgagattaatgtataaaaagcctgtattaattaaggtgaagcttcctgttgcgttagagtttgtttaaatctaaaaccagactaaaataattgatcaaaaaatcaaaggagcccatccctaacattattattaaatcaacaactactcataaaattttaggagtaaggtatacattatgctattagaagaagttttcacgtatatagttctttttgttatagttaaaacatgtatgtttcttataaggaaaattaggggtaatcttttatttgatgtgctaaggaatttattatttttcgtcccttttattttaccagcactttatttaggcttacctaatttaatttttcaaggttcgattaattattatttattatccattttttcatcatttttagctttaagcattaagtataaagaatttaaaccttacttcaataaaaatttttaccaaatcctcccgaaaatttcttttaaagactttttaatattggaaatatctttgataggaagcgctatttttgaagagtttttttacaggagttttgctcctcactcctcttttattgtaggcatggcattgtcaggaatcctatttagtattgctcattatatacagaactatacaagaagttttttcgatttaaagacatatattttattgtttttattaggaatggtttggtattggagttataaaaatactgggactttaattccagcaattttaggtcatttagtatataaccttcctagtatgattttcacctattttcactttaaatcatcaagatttcggtgaggaaaaagggggttataatagtgagtagaatcataattgcaactataaaaagaaattatatagtttcaaagagagtttttccttggtcttttattatagccagagttcttatgggaatctatgtttctgtatttgctttttttacttttaaatatatgtttgatggaaaaacagaaagtcattttttaaagtatagtaatgggatagactatataagctttgtagttctaggagccggtctttatacatattctatatctgtaataatgaatgtaggtagatctcttatgttagaaaatatagaaggtactttagaaagtatacttgtctcaccgtgttcacgtttagggtactttttaggagttttttttgaacaaataggtagatcaagtttagagtttctaatagttatatttttcagtttatatttaggtgccaatattgaaattgagaacactattccacttttaatagtaatcattattactacaatatctcttttcagtattggtatatttatagctactctaatgttatttctacgcgacacctatataacacagaatactttatttatagttatgggattagttagtggagtatcttttccgagggagtacttacctaatatcctctactatttatcctatttgtccccattatcttatgcactttctttattccgaggtgttatgacaggacaaaacattttaaattacacaaaggaaatcttggacatatttgtcttgagcctagcttattgtctttttggtttactttggcttaaatgtctggaaaaaaaaatattagaaaatacatttaactaagggtgatagtaaatgctaattgccaaggatattagtaaaacttatatattgaatgagagaaaaggtttttttataaaaaaaaaaacagagattaatgccttgaaaaagctgaacttaacaattaagccgggtagtattgtagggttattaggagttaatggcgcgggaaaaagcacaactattaaaatattatcgaccattctagcgccaactactggctccttgaaagttaatgaagtcgatgcattaaaatatcctgtagaagcaaaaaaattgttaaacgtaataactggtggtgaaagaaatttatattggaggttaactgctagagaaaacctcgaatactttggagcattatatggactatctaaaaaagaacttaaagactatataccatcatcacttagtttggttggattaaaagactcaaatataccagtcgagagatattcaaaagggatgaaacaaagattacaaattgctagggggctagtaaataatcctaaatatttatttttagatgaacctacattaggcttagacataaatattgcaaaagatttaaggcaatacataaaaaaattagctcaccaaaaaaacaaggggatattattaactacccactatttatctgaagttgaggagctatgcgattgggtttatataattgacaaaggaaatttgctcacagaaggcactccttcagatattgtatcaaaaataataccagaaattcaattgaaaatagaattgtcaaatctaagttgtgaattaaaaaaagaattattgtactatgttggtgcaatagatgctaaaatacattttttcaaagatcatactaattactcgattttattatcatcgaaagacgatttaacttctgatttggttaatattataacaaaatacagaacttccattctaagttttaaaaccgaagaacctaatcttgaggatgcattattaacattaacaagtaaacaaggtgattcaatttatgaattggttaaaggtaattaaagctgaaatatataaacaacataagaattcatttcattcaacaaaagcttatttttcattattaatatggccaatattaaacttaattaatgcctacttatgttacaagccttttaatttaaacgatttaaaattatatagaattaatacatctgacgaattaatatcctttttattaataggttttttcacttatatttcttttaagtcgttaatgcaaagtgctttacaaatgagttatgaaagatcaaatggaactttggaaacaatattcttatccccagcaaatcgtttatcattaatatacggaagaagcttaggatttatattcggtaatatatggatgttttttgcgtttactttttttataatgtgttatatcggatcaatacctatatataatttagtctattttccaatatgtttcattctaatcgtcatttcagcaactttatggggaggcttattaaatactatctttcttttttctcgagatgcttcgatattgtttatgattattgatgatcctatgatgttattttcaggtgtgagaattcctctaactcttttcccaatatgggcacaagtaatttcttttatatttcctctcactcatgttttagctgtagtcagagacttaatgttatttggagatatctcgttatcctcatggaatcatttattatacttattatcagaattattatttatgtatatgataactttatttttgctatcaaaagctgaaaaacatgcccgtattaatggagaattaaccttttattgaataggttaaaaaaaagtaaaaaatacttaattaaagtattttttactaaatttatttcttatagtttattttttaaactacatgttttttatacttttatttagcttgattacattgttaactaaggagaaatacctttgtctaaaggtgtttctttccttagttaacaaatcaatctccaatcatcttactttttttctgacagccatttggcaataacggcggcttccttatcatctacaagccccttcggcatattgccgcggccgtttttaataatgctttcaattttgtcttcgtcgtatttgcctccgacctcttgaagattaggccctgacacaccttctaaatccttgccgtggcagcctacgcagctttgctgatataattcttccccttcagatgcagaggcttcagtcttgctgcctgtatctgtcttctcttcttttgcatcatttgaaccgcaggcagccaaaagaactgaaagcgtaaatacaagcattagtatcgataactttgatttcatgttgagaagcacaactcctttacgatctcttccatattataacctcgtttaagcacgtttgaaaccctcgcccagcacctcacttgcatccgccacaatcacaaaagctgactcatcaatctgtttgacgatttgtttcaatttggtgaattcagtttgcccaaccacgcacattaaaatcggacggtcatcgtcagtatatccgccgactgcagagatttttgtcacgcctctgtcaatcttctgtaagacagcctccttgacagcctgctcctgctttgtaatgatgagcgccatttttgaacgattaaagccgacttgcacaacatcaatggttttgctggacacatagacgccaagcatggcatataagccttgctcaatattaaatacaatcatagccgtaacaacgatcattccgtcaatgatggcgagacacttccccaatgacagaccggagtacttatgaatgatctgtgcagccaaggctgttcctcccgtcgatcctttccctaagtacacaataccaattccgatacctatcccgacaccgccaaaaatcgccgccaggagttcatgatgagtggcgggctgaatatcccttgtcagaaacactactagcggcaaaaacacagaacctgcaagcgtctttagtccaaatttcccgccgagcaaaatgacgccagcaataaataaagggatattaataatccactgtacatacgctgcttcaaaaccatatgattgtaaaatcgtactgatcccgctgacaccgccggcggcaatcttgttcggaagcaaaaatacattaaaggacacggccgtaatcgctgctcctatcaatatgtatacataatcccgcaaaatccacaatgttttattccgtacgtccatcatatatcctccgtttcttccaatgctctccgatagcattttaatccttccctgattagatgtaaataacacccaaatacagtggtaatatgctaaagcagcagtgaaatcaaggatataaggaattaaaaaaacacacccgttgcatcaggtgtgtttttcagcttatgaaagcttagaacgcaggtaggcatcaataaacgtatcaatgtcaccatccattacagcttgaacgttccccatttctgtattggtccgatgatcttttaccatggaatacggatggaatacataagaacggatttggctgccccagccgatttctttttgttcaccgcgaatttcatccagctctgcctgctgctcttcaattctgcgctgatacagcttggccttcagcattttcatggctctttcacggtttttaatttgtgagcgctccgtttggcatgtcacaactacgttcgtcggcaagtgagtaatccgaacggctgaatccgtcgtattgacgtgctgtccgcccgcgccgcttgcacggtacgtgtcaactttaatatcctccgtacgaatatcaatatcaatttcatcgttaaattcaggcatgacttcacatgaaacgaaagatgtgtggcggcggcctgatgaatcaaatggtgagatccgcacaagacgatggacacctttttctgctttgagatacccgtaagcgttgtgtcctttgatgagcaatgtcactgacttgattccagcctcgtcacctggaaggtaatcgagtgtttctactttaaagccgcggcgctctccccatcttgtatacattctaagaagcatagagccccagtcctgtgactctgtaccgccagcaccagggtgcagttctaaaatcgcgttatttttatcatacggctcgctgagaagaagctgaagctcaaactcattgaactcttttgttaatgattttagttctttttcaagctcaagctggagatcagtgtccggctcttctttcaaaagatcatgagtcatttgtaattcttcgtgggattcattcaattttttatacgaattgacataatcctttaaaccgtttgcttcatttataaccgtttgagctttttgctgatcattccagaattccggatcagccatttgttcatctagctcagcaatgcgggcctcctttgattcgaggtcaaagagaccccctaaagtccgctaaacgagaagccatattttcgagctctgctctgatttctgataattccatttcattcacctcattaaaagatccgcaggcgcctgcacgcgccgcggtcagtaaacttgccggggcgaactattcagtacggccgcagcaatttttatattttttcccgcttccgcagtggcatggggcatttcgtccgatatcaaccactttgcgaaccggtgctttctttgcttttttgttatcgtcgccttcttgcggctgatgagctgttgtttggccttgtacaacctcttcacgctccagattgttttcaatctcagctttcatcacaaattttgcgacttcgtcctcaattgattcaatcatatgctcaaacatcgcaaagccttccatttgatactcacgaagcgggttcgtctgcgcgtaagcacgaaggtgaatcccttggcggagctgatccatcgcatcaatatgatccatccatttagaatcaacggcacgaagaacgataactttttcgaattcgcgcatttgctctttgccgaattgctcttccttctcattatattttgtgatgatgcgatccataatgagctcaagcatttcatccggttctttcccgaagatatcgctcttctcaagcgcaccttcatcaagataagttgtgttgataagatcaactagaccgtcaagcttccactcctcaggaagctcttctcttggcgtatagactgcaattgcgcgttcgagagaagacttgatcatattttcaacgatttcacgcaggttttcagagtcaatgacttcaaagcgctgcttataaatgacctcacgctgctggcggagaacatcatcatattgcagaagctgtttacgcgaatcgaagttattgccttcgacacgtttttgtgacgattcaaccgcgcgagataccattttgctttggattggagtagagtcgtccatgccgaagcggtccagcatcgccattgtccgctcagctccgaatctgcgcatcaattcatcttccatagaaagataaaattgagtaatccccgggtctccctgacgtccggaacgacctcgaagctgattgtcaatccggcgtgattcatgtcgttctgttccgacaacagcgagcccgccaagctcttttacaccttcgccaagcttaatgtccgttccgcgccccgccatgttagtcgcaatcgtaactgcgcctttttggccggcctcttcaatgatctgcgcttcacgttcatggtttttggcatttaacacttgatgcggaattcctttgtttttaagcagcttagaaatcaattcagatgtttcaacggcaaccgtaccgacgagaacaggctgtcccgtcatgtaacgctgtgcgacatcctccgcaactgccttaaactttccttccatcgtgcggtaaattaaatccggtcggtcatcacggacaacaggcctgttggtagggatcgtgacaacctgcatgttgtagatgttgcggaattcttcttcctctgtcttagctgtacccgtcataccggcaagtttttcgtacatccggaagtagttttggaatgtaatcgtcgccaaggtcatgctttcgttttgaatctcaagcccttccttcgcttcaatcgcttggtgaagcccctcactgtagcggcggcctttcatcagacgtcccgtgaaggaatcaacaataacaacctgtccgtcttccactacatagtcaacgtccttttgcatcgcaacgtgagcttttaaggcctggttgatatggtggttgagcgcgacatgcttcacatcaaagaggttatcgatgccgaatgctttttccgccttcgtcattccttcttcagtaagctgtacagcttttgttttgatatcgtacgtgtaatccttctccgcttttaacgtgcggacaaaagcatttgcctgtacgtacagcttagtggattttgcagcttgtccagaaatgataagcggtgttcttgcttcatcaattaaaatagagtcaacttcatctattaccgcaaaatgaagcgggcgctgaaccatctgctctttataaagaaccatattgtcacgcaaatagtcgaagccaagctcgttgtttgtggagtaagtaatatcagcggcataagcttcccgtttttcgtcttttgacattgagtttaaattcaaaccgacagtcaaaccgagaaactcgaaaattttccccatttgctcagcgtcacggcttgccaagtattcgttgacagtcacgacgtgtacgcctttaccggttaacgcatttaaataaacaggcagggtagacgttaatgttttcccttcccctgttttcatttccgctatatttccgtcatgaagcgccacgccccccatgagctggactttaaacggaaacatgcctgttacgcggcgtgaagcttctcgaacaacagcgaaagcttcaacaagaagatcatccgttgtcgcccctttttcaagacgctctttaaattcaattgttttatgtttcaacgcgtcgtcagagagattttcatagtctccgcgaatcgcatcaatatcgttagcaattttttcgtatctattcagcgtacgttttgttggatcaaacattttatttaaaattccaagcatttataacgctcctctatcttcacatgcctattttagaggcatgtataaataatttactagtccatgtatacctctcattatcatatcataccttttgttatttccaaagaatttgcaaataagaaaaacaaaaaccttccgcggacatcacggaaggcttctcttcattattcagtcggttcaattaagccatatttcccgtcatttctgcggtacacgacatttgtaaggtttgtttccgcatttgtgaaaacaaagaaattatggccgagcatattcatttgcaagatcgcttcttcactatccatcggctttaaattaaagcgtttctgacggacgatgtccaagctctcctcctcttctatgtcatcctgaaccgcaatatctgtatcagagccaagaccgtttgccaataaatattttggagagccctgctcacggaatttacggtttactttcgttttatgcttacggatttgacgttccagtttgtttgttgcgagatcaattgcgttgtacatatcctcgttatgcacctcggaccgaagcgccagatctgtcatcggaatcgtaacctcaaccttagactccttgtcattgtaaaacttcaagttgacgttcacatcagcatccacgctatggtcaaaatagcgctccagcttgccgatcttcctctcgacatgatcctttaacgcgggtgtcacttcaatattttctcctctgatgttatagttcatcaaagaacgcctcccttttattaaggatatgtatctatttctcttttaccctttacaattcctgctgaaacataaatcttttgtgaaaattcagtgaactttgtcgaattttgtttgtatttgctctgttattggcggttcggaggtatatgtatatgctgattgaacgaaacaaatacctcacacacgcctaattgattaaaaagggttccatacattgatgaatagacagcatccattttctataatgaatcagaaaatgttcctttaaatactcacagaactcatgagagggaaaagagaaagagaccaattgatcaaactccgcaaaaatttggtcaaatgctttcacacaaatttcagcacaccgcgaatccataatgaagagaagtgttgaatgtgttgaatccaaataaaaaaaggcttggatcagatcttggtagatccgatccccttctgtttttgataaattctcttcagcctctatcaaataacacaacccctcttcgatggtaaaaagaagatgataataagctgataaaagcgtataatcttcaatgctcttcaaggcactcacctatttacgcttgtcataatatgtgccgtcaatcgtaatgttgttataagggtttaaatacgtcgtatgcatcacacgttttcttttcatctgctgaagttctgttgcgattgactgcttcagtctttccatttccttcacaatcagctgatcccatgtcaaaataagtttcatctgctttctctcttcttctgaaagcggcagagatatctcctgaatcagttcagaccgtgtagccacaaagtcttcaatttgctttaaaagttcatcgctttccggcgtattttgtatgtgtgacagcatactcttcgtctcagtgtatagttgatctatattattcatgcgatcccgcctgatccgtgccggtccttccgttcactttgaattgcttgtttccaagcatcgcgaaaatctgttacataaccttcaacctcagccagcatgcccgtatcatttttgatatttgcctgtaccaatctgcgatacatataatcgtacatcgcacccatagaagcggaaagctctatgttacggttaagtgtaaaatttaattcctgaataatattttgcgctttaatcagattttcatttttacgttccatatcatcattctcaatggcctgagcggcaagtcttataaatttcaaacagccattatacagcataagcgtcagctcaccgggtgtagccgtattcactgaattttgctgataggctgtataaggattttggatcgccatgtgtcatcctccaaattacatttattgtgctagaagctgtgataaataggacgattgttcgttcattttttgaatcgcagaatccattgcactgaattttgaataatagcggttttctattgtggtcaaccggtcctgcattttggtaatatcagtgctgatcgtatttaaatttttaccgattgaataatcattggttcccattgtcgagttgccggcttttgcttcaatgctcttcaccgtacttttcagggtgtcaccgatgcgtttcataatccctttatcactataggcgctgctgttcgatccacttgtaaataaagcggcgacactttgcggatcttcttgtattttagctttcagtttgtcttcattaatttctagatgtcctcgcatttggtaagcaccagacgttgtgatgccaaattcagttaattgataggtttttccatccgcactaacttgagaataaaaatcagtccgcatttgattcgtaccagtgcttatgctggtatcatttttcagcaaaccgctttttgccttctcttcccagagttctatctctttatcggacatggcttctttttgttcactcgtcagcggcgcatagtctctgtatttttcttctttcaacttttcattcaggctgtcaaccagttcattgtatttattcacaaactctttaatttggttgtaaatcccgtcaacatcagtagatacagatgtggtaacagggcctgtggctgcagttgtatttttgatcgaataagtaacgccattcactgtgaagttgtttgacagcttctccatttcaaagccgttgatggtgacttttgcattcgttccttctttgtaagcagtaatcttattatcagtgtccaaagaaaaacctagctggccagacataaaatctgctgtagcagagtctgctgcttgtatactgcctcctgcacctgttgctttagaagaaaacgcaatggtttccacatactctgtaccattccaaattttatctttaaaagctgatactcctagatctgagctgttaagtttagaaatcacattatcaatcgtatcagcgctcgtcacactaatgttcactgtttttgcggctgtctcaccaggcgcaacaacgttaaatgccaaattataatcgccctgtgtgtatcctgtataattgtttgccttatatgtcgcagcagttgccaaacttgctacttcaatagtagatgaagagtttgctgcacttgcagttcctgtagcagttaacacagattcgtttgagcttgatacggttttactctgaaacgtactcggatatgtcagcttattattagacatataatcttggaattcttttattttcgagtttacttcacgatagctatcacgctgccattcaagagtctgctttttttgtgttagcttattaagcggtgctctttctgtctgcatcagctttgatacaatatcatctatatccattcctgacgccagacctgttattctcgtgaccatttcaaaccactcctaatctactttttttcatctacaaataacccaagaaattcagtcatagctgcataaaaatctagccaccgccttggcggaatttcacggatcacttcatttgtagagtcctctattacttttacatagtattcatttaacttctcatggagctcaaacttcagatgaacttgcgaaggttccaaaaacttgttcattccctctaccatttcagcaaggtcggtatatgaaacttgatgaacaggaacctcactctcatgatctttctgattatgtatttgagtatcatagcgatcccaaacaggttgtaacgtagtgagcctttcaatgttcaattgatcatcccctatgccccaatctatcgtttatatcgactaaatcgagataacattacacatatttttggaaaaaatctcatccgttttagatttcttagtttggaaatacgtttataaaaagtaagtggagaatccggttattatatcatgatttaataacagcaagtggaatgattcggagttagaaatataaataaaagaccttggcaacgccaaggtcctctctaaaattaacgtaacaattgaagcacgttttgcggctgttggttcgcttgagcaagcattgcttgagaagcttgagaaagaatgttgttctttgtgaactcgctcatttctttcgccatgtcaacgtcacggatacgagactcagcagctgttaagttttcagaagaagcactaaggttgttaattgtgtgctctaagcggttttgtaccgcaccaagttttgaacgttggcttgaaacgctagtaattgcagtatcgattttcgcgatctcagtgtcaaaactaaaagtagctgatgaaacatcgatcccttttactcctaaagttgttgcatccatgttgccaattgtaacattaatgttttgggtagcatttgcaccaatttggaatgtaaatcctgctgttacactaccgtctaaaagtttttttccgttaaattcagtacgttgagagataccatcgatctcttcagttaaagcatccatttcatctttaattgcagttaaatcttcaggttgctgtgtacctgtgttaccagcttgaacagtaagttcacgcatacgttgaaggatggcatgagtttcagtcaatgcaccctcagctgtttggataagagagattccgtcttgagagtttttagaagccatatcaagacctctgatttgtcctctcattttttcagagatcgcaagaccagctgcgtcatctcccgcacggttgatacgaagacctgaagaaagtttctccatgttcttttgtgctgcaccgttgtttgaagacaaacggttcagtgtgttaagcgctgcgatattgtggttaattctcatttttatttcctccctgaatatgttgtttaggcacgtccttgtgcctcaattttgtaatcggcgagccatttgtgccctctcccggctacatcattaatatcggattgtctctgattttgttaatacaaaaataaaaaaatcctcactttttttgtgaggataatgcggagatcacatcgctggataacgacgccgcacggttattttcttcctgaatggttaaataaatctctttccgatgaatatcaatatgctttggggcttcaattccaagcttcacttgatccccctcaaccgcaatcacttttacttcaatatcagcacctatttgaatcgcttcgcttattttccgcgataaaactagcatgattctcctccaatcggatgctttgtcgtatatgaggagtcgtgtaaaacgacttgcttagccatcatgttcttgcgattcacaataatgggagccaataaattcgcagtagacttttcaaatggctctgccatagtcaatattgtcatgacttctacgtcttgaatattatcgatatccaaaagttcagcagttgattcatcaagatcaaattcataattcttaaaaaagataaacggacttacgacgataaacgcaagattttctgaagtgacggactgcagtgccacgaatggagagtcttctgaaagcggaagtatgacaaattgtttttcttctaaaaagcctggaatcccgctttcaaaaagaatgatttgttcttcttttatgttcatttggccatggtacttcgtatgaatgatcattgttcacgatccttttctttttacttttcgggtgattctttcgggtattctacatctatatttaaatcagggtattggagcatgtcaaccttaacatttcctggcgtatattcaacaattggcttatgcggctcagcctgaataacaggctttcgcggcgtaatctgaacatcaagctgtgacggagtatattgtattttcaccctagatagagaaggagcataattttcgcctaattgaatttggtgcatttcagagttcctccttgcttgtgaagcgattgggttccccttattttcaatcctcataagctcgtcgccttcttctgcagtacgcgctattccctccattacatcctcatgcccttgttgtgcggcttcttcaattctcttgaaaacatgctttctgtctaattcttcccatgcttgtgtctggtcaatcgtgagttttccaggtgtcaccgatatttccatttccgcactcggctgttcgatctctagatcagcttgaggctgctccatttttaagctggcaggcgtcgttgttaaaccaatttttccttgaacactatgcataatcaatctgggaatctgcatcactctacctcctgaactataaaaaaagcgaactcctgagagccgcttactttaaaaagtcaattaatgtaggctgaacaatttgcgcattaacggccagagtagccctgtgcacactttgctgcgcaataaattcagttattacttcttccagttctacatcttcattgtctgataacactttggtagctgtttcttcttgcgctgacagtcttgtattaaccaattcaagacgattatatctcgctccaagatcagatcgttcagcactcatgccgtcagaaaaatgatcaatatcatctaaaacactgtccatgccatctagcgaaccagaatttagtgctttctcaaaagaatcaagcatttcaaatacattctgcccgctttcagaagtgcctccaaaagctgactttggatctgaattcactttcaatgacatattatttgatatattgactacgacatcagctgtatcagaaattgtataagttccgtctccgttatctgtaaccggaggcttatctgaatttgtgccattaaagatatatctgccgttcacttgtgtattcgcaatatttaaaagctgttcctttaactgctttacctctacgccaatcgcttgccgctccgactcgccgtttgtatcattttgagcttcaaccgctaattctctgacctttgacaagatgtcaattccttctgtaatgtttgtttctgtgttttcgagccaggtaaaggcttgagaagcattgcttttgtactgctgcacttgagacagttgcgtattatactttaagcttttcattgctactacaggatcgtcggaagcttttgagatttttttccctgaagaaatctgcgactggagtttatccagcttcgagtagctcgaaccgatatatctcagtgagttttgctgtatcatgccttgtgttactctcatgtgactctacctaccttcctccaacacccatgccgttgatcactttatcaagtaattcgtcttgtaaagtcaccattcttgcagctgcattgtatgcatgttggaattgaatcatattcgtcatttcttcgtctaaagaaactgcgctcatttgctgacggtttatgtcagcatcatttagctgtgtttctgtattagacgccagtcgattagcctcttgagcttcgatccctagctcgccaatcagacccgcataataatctaaaacactagtttctttaccgttaatggttattttaccggttaaaacatttgctaattttgtagcatttgcgttatcgttggctgcaccagtcagtgagaaagcaatgtttgcgccttttgaatctattatgctgtcagccactttgatcttgcccgccgcgcccttggcaggttcagtttcaccgccagtaaaatcaaaaaagtctccgccttgttcaccgctcttggtcacaccatttctgtgcacttcattgaaagctttcgcgaattcaagcgccatattgtcaagatcagaaagcatttccgggtatacgcccttttcttggccgtctgctgttatatacccgtaagactctataaatcctaaaagggatcccttgctgctaaaggactccgcctgcacagctgtatccccgattgaaatacttgatactaacccagtttcattatcatagttggctgcaagttctgaaacctcgtaatttttaccgtccaaaacagttcctagcgactgtttatttttatcaaggatttcaattgatacagttccttcagcagatgcaagtgcattcccgcctgatttgttgtagttgactttgatatcaaccattgaggataatttatcgatcagcaaatctcgctggtcatataaaccattcggaagaagcccgaccggctctacttgtgcaatttgcttatttaaactgtttaattgagaaagcagagaattgacatccaacacagttgtatttagctctgcttttaaattcgattggacatttgtaagtgattcagaaatataattaaacgtttcagctacagcttgtccttttcgagcaacaacagaacgtgcactttcttcatttgtattattcgataattcctgcagagaattccaaaacgaattgagcacactgttcaagccgctgtcatccgtttcatttaaaacgccttccatttgggacagcgctttggccttcgtgtcatagtatccggcactgttgttttgaagacggtattggtagtcaagaaagatatctcttattctctcaactgattttccttgaacgcccgtacccatttgtcccgctgttttttctgcgtttttagatacagcagggaaatagtcagttgcttccaatgagacccgctgtcttgtataaccatcagtattggcatttgccacgttatttgcagtcgtgcttaacgctgcctgctgagcgcttaacgcccgccttgcagtttcaagccccataaaggtagatgtcattttctgaattcctttctgctaagcttttgaatcaaacagtttcattttgctgcttttcggcagctcagctttaattgatttgctgtaattgaagttattttccttaggaaccagcatatcgtacgaaatagagatgaattgcagcgcgtctcttgtcagctgcctattcatctcatttacttttttcagacgtccgagaacttgagaaagagattcgtatagttgttccagctcttccttttcactgcctgaggttttggtgatacatgcggaaatagtattattttcgctatatccgagaaaggccgaagttgttttgatccggtcatcttctgtctgcgtgattgcttgaatatatttttgctcttttgtcaaaatgttagaaagctcttttgttttgccggctttgagcgcttccgtcttttcttcagacagcgtgagcaggtgctcatgcagaacgcaaagtcgcttcaattgttcaataattgccttcgctgacatgggctttctccttttttattgctttttataaaaattaatcatatttttcgcgatatgatttgcgtctactttgtatgacccgttttcaatttgcgctttaagctgcgcaattttttcctgtcgtgaaccagtgactgcgtcggatgcatgttgcatttctttagcctgtgatgaaatttcaattttatcttgaggctgtgcagcagttttttgcaccgcttgcttatcataatttttttgatatggattaacggattgtgttccaaattgattgattttcataggattcctctcgctttccgttgcagtctttaaacaatcttaacccttttatcgactgcgttttcagttagtttagggaatcagctgtttttggtattataggcatagtatgtgtcttttttactattttctttctcgattttcagagcatcctcgtggttcaaatgatccatttgatccttaatatcggactggcaagccttgcagaatttgccttctctaatcgatgtcccgcacctttcacaagggtatgccaaattaggaagatgagtgatctgaattcgcttctgcctgatgaatttcaatatcagctcttcttccacacctgtttcctcagttatccggctcaaagttgattgccggttttcctgttttcttaaaaatttatagacagtctcaaatgatttttcttcttccttaatacacgcctgacatacggtttgcagctttgtttttaaaaataaagcattgcatttcggacaattagccagttctcccatcttttttctccttattagataatatgcctgtgtcaatttctagtgattatatcggcataaaaacagaatcatttagcttctgatcaaggtaaaagatgacactgaagcggcttttcctttttctaataagcagcgggctgcgaagtgcaaggtggcgcctgttgtataaagatcgtctattaaaatgatattcatacctgctgctgaattattttttgtatcaaaaatgcgctctgacagcaggcgttctgttttctttttctttgactgcttctcattattcaggcgaatgaggggatggtgggaaggccgatctaaacattctgccaagagctgtgcctggttaaaaccgcgctcttcttcccgttccttgctcagcggaataggtacaagaacaaaatgcttatcggggtaagccttagaaaaggttgaagaaaaatcacttttaaatgcatttatgatttctgcatctcctctaaatttaaaacgggagagcgcttctttcatcatatcattatatgtgtaaactgaacggttttgacgcaatagcaaactgtctctgatccttgttctccacacctcgcaatccctgcatacggcatgaacagattgaggtctgccgcacagggggcagatatgtcctgtgattttctttaatttgcttctgcaagaataacaaaccttttcatcaggctttagtaaaaaaagggctctccatgtaacatcttgagaaaattgcgaatcacataataaacagatcagtttatgaatgcctcctcctgcttcgtttgacataaatcgcttggactctctgaaactactgcagcagattcagccaaaatgacaagcattgctgtgtttttttgtttatctaccagctcagctttcgtatatgcgatctttttaagatcagtaacgtaggatggactcactttgtttaaagaaagtgccaatacatcgttttggcatacttggcaagtacaggccatatgaagctggtccatatatcggtcgagcagttctttcattacgatttcttttgaattgacaagcatttttacagctcctcatcatcggttatatgagtatactgtaccacgttttcaaataatggctagtctgtacattcaacttttgctgccaattcattcatttcttttatatgctttcttgcatcgagcatactctttgttttgccgaagtgaaagtaaatgacatcgccgtccgcatattctttatgccggccggttcttcctgcaatttgaacaagtgcgctttccgtaaagatagacgattccgctcctagtacacccgtttgcaccttggggactgtgacgcctctttccagtattgttgttgtgattaatagatcgagctgaccatctctgaattgctgcactttctcctttctatgcttgtcttccgcgtgcacagatgcggttcggcaatgaacacctttaaagcacgcagcagccttttccagaatagaaacggaaggaacgaataaaaaaacaggcctcccttcttttacatgaaactctatccatcttttcaccgctggcggaattttatttcggtttaatttcttcttccagtttccacaccatacaaagcgcggttcgggtaaaggtttccggtggtgtcttgcggggatgcgaactgaatgtaactgtccgttcagtgcttttctttttaattctttaggaggtgttgcacttaaataaacgagggtgctgtttttctttcttgctttttgaacagcgaattgaagggtttgatcagcagaatatggaaaagcgtcaacttcatcaatgatcataacatcgattgcatctttatatcgcaaaagctgatgcgtagtggaaatcataagcggagatagccgccctttgtcatcgcttcctccgtaaagcgctgaaatgtcagcaccctgaaaggcagccttgagtcttggagcaagctctaatacaacatcggtgcgaggtgttgcaatacatacacgcagtccttgatttaacgctgattctataccaggaaacagcatttctgttttgccagcgccgcaaaccgcccagatgaggagctcttctttttttgatattgcttcaattaaaacattggcggctttttgctgtccgcttgaaagcttgccatcccatgtcagcttaatagacttccagtttgattcattttcctctttccatgaatataaaggaacctcctcactcactctgcccatcatgacacaggaacggcaatacagcttattctttccagatgagtgataaaaagaaaaataccgctgatcagtttgtccgcacctattacatctatatctccgtttatttatggatatagaattttcagcagtgatatatccattcttgatatgccattcaatcatctcatcggaaaatgagagctcagtcctgagcaaatgacggcttcgaagcgtctgctgcaattcttttgaaaaggaactgtttttttcaactggcacattcacatagcacgcctcctttcgaaacagtatgcctgaatgaatattttctgtccaactattaaaataagaatataaaaaaatctccgctctaaaaacggagatttggccttatttaaaacaccagcaaattcctaacgcaccttcacccaaatgagtgccgattaccgcgccaaaatagctgttataaaattcaacatgaggatattttgcagaaagctcttcaatgattttcgctgcttcttcctctcgattagcgtggataacagcagctcgcataggcaaccctttactcgcatcttcgtctaaaagctcataaattcgcgaaattgcttttttacgtgtgcgaatcttctcaaaaggcacaattaccttattgtcaaaatgaaggataggctttacctttagaagactaccaatgaaggcttgggcgctgcttaatcgcccgccgcgctgaagatgggctaagtcatctaccataaaataagctcgaactgtttttttcatttcttccagttcttttataatatcttccggcgatgatgctccgtttttgattaattcagcagctttaagggcataaaagccttgagccaagcagctgatctctgagtcaaatggatacacatcaatattgtcgaccatcgaatcagccgctgctgcactgctgaatgttccgctgatcccgctggaaagatggatactgataaccgcatcataagacttgccaagctcttcatacaacgcaaccagctcgccgattggcggctgagaagtcgtcgggagctcattatgttttttcacttcttcataaaagcttttccagtccaactcaatttcttcacggtaagtctcctccctaaaaacaacctggagagggatcatatgtatctgatgttgttcacgcatttctttcggaatatatgccgtgctgtctgttacgactgcaatattcatagcttcgatacctgccttattgctttataactctattgtaagggaaacggcagcctaaaaaaagacctgcctagtaaaaggcaagtctcctattatactatctcatttctacccagccatttttaatggcgaccacaacggcttgcgtccggtcgtttacattcattttttgtaaaatattgctgacatggtttttaacggttttctcactgataaacaatgattcaccaataccgcggttgctttttccgtctgcaagcatctgcagcacttcacattcccgcctagttaaaatatgtaatggtctgcggatttcagggtaaacctcatgttgagggtgtgcagaaactccgcttgttgcaaggcggcggaattcgttaacgaggttgtgagtaaccttcggatggaggtaagatccgccctcagccactactttaaccgcttcaattaatgtatcagcatccatctctttcagcagataacctcttgcacctgttttcagggcatgtgttacataattttcgtcatcgtgaattgatagaataattactttagattcaggatacagctctacaagctgttttgtagcttccacaccatttacgtttggcatattgatatccatgatcacaacatcaggatgatagtgctcaacaatacgagccgcttcgtctccgtcatcaccttcggctaccacttcaaaggtaggttcaaaatccaatatccgtttaacaccttcacgaaataactgatggtcgtcgataataacaatgtttactttagtcacaagccacgcctccttgtattattgttctatatactctagcattcggtcaatatgccttttggctctattttacaaatcatagtcaaagagataacggaaccttaatcataataaatgtcccaagacctattttcgaatctattgtcatcgttccttccaataaatctactctttctttcatgcccagcaagccgaatgatttgtttttcttctctttcgcttccttcaggtcgaaccctttaccgttatcttttatcattaaaatcacaaaatcctttgtgatctcaactttgactgtaatttcttcagattcagaatgctttagcgcattagacacagcttcctgtgcgagcctgaagagcgcaacctcaaactgaggcgctagcctctgatcctctgtttctccaatgcactgaaaatgtattttgaccttcccgttatattcctcggttgtatatagatattttcttaaagttggaatcaggcctaggtcatcaagggccatcggtcttaaatcatatataatccttctcacttcgtaaagggcattccgaacattttggcggagatttttaatttcttggaatccgtcctctgcgccccggtcacggaaaatccgctcgattaattccgatctcatcataacattcgccagcatttgagcgggtccgtcatggatttctcttgagactctttttcgctcttcttcctgcgcctcaataattcttaagccgaaatcctgttttgcctgagcatcagcaagaagcagtccaacttcgcgcaaatcctgattcaagtagttgagcacaactgtaatttggcttactaatgattctgaccgctcaatgatttcctgaagccctagcaatctgcgctccaaatcgtcccgccgttcgcgcaattgcttctcacgctgctggatcatcgtcaattctacctgcagcttatgggctttttcataagcattgcggatttcctcttcactgaatctatgaaaattacggctgacctcggataaacggtttctcgcatggcgggtttgcacttcaagtttatcgccaagctcaatcacttcatacacctgctgtttaatttgtttcagttcttcgaccagctgttcatactgctggcgtgactgctccccgatttgaaaaacctcgtccttgctcccgtcaacggttttcagcatcttcatcaaaatagaatccagcactttggaatccatctttgttttattcataatttccctccgtcacggcgttgtcatatatttttattataaatgtaattgatctgcaaattatgtcgaattataatgaaagaatgcgtatattctagaaaaaaacatttttatatactatctactctttatgataccaaaatacgcacaaaaattctaaagactgtacgaatttgtataggcagtcttttatgcttagcaggagggtcagctagcatgctgcacagctattttactgtgaaagaagcaggagaacacgagattgttatagaaaaatcgcgttttatctgtcatttaagccgtgtttctaccgaacaagaggcacaggaatttatacagaaaataaagaaacagcactggaatgcgactcataattgctcggcttatgttattggcgagaatgatcatatccaaaaagccaatgatgacggggaaccaagcggtacagcgggagtgccgatgctcgaggttttaaaaaaacgcagactgaaggatacttgcgccgtcgttacacgctacttcggaggcattaagcttggtgctggcggattaatacgcgcttatgggaaatcagtgtctgaaggattaaatcatataggtgttgtagaacggaagcttatgcgaatcatgcatacttctgcagattacacatggcttggcaagattgaaaatgaattaagggagtcacaatttctgttaaaggaaatccattattcagaaaatgttgaattcgaaacatacgtggaagaaaaggaaacaaatgctttttctgaatggatgacagaactgacaaatggaaagagtgatattaaagagggagagttgacgtatcttgaaaaagccgtcaatcacataaaggagactgaataatggctgaacgcgttagagtgcgtgtgcgaaaaaagaaaaagagcaaacgcaggaaaattataaaaagaataatgttattgttcgtcctcgcattattagtagttgtggggcttggcgggtataaactttataaaaccattaacgctgcggatgaatcgtacgatgccctatcccgcgggaataaatcaaatcttcgcaacgaagttgtcgacatgaagaaaaaaccgttttctattttatttatgggaatagaggattacgcgactaaaggacaaaaagggagatcagactctcttattgttgttaccctggatcccaaaaataaaaccatgaaaatgctgagcattccgcgtgacacacgtgtgcaattagctggtgacacaacgggaagcaagacgaagattaatgccgcttacagcaaaggcggtaaagatgagacagttgaaactgttgaaaacttcttgcaaatcccgattgataaatatgtcacagttgattttgacggatttaaagatgtgattaatgaagtcggcggtattgatgttgacgtgcctttcgatttcgatgaaaaaagtgatgtagacgaaagcaaacggatttacttcaaaaaaggcgtgatgcatttgaacggcgaagaagccttagcatatgcccggatgagaaaacaggataaacgcggagactttggccgtaatgacagacaaaaacaaatcttaaacgcgctgattgaccgcatgtcaagtgcaagcaacattgctaaaattgataaaatcgcagaaaaagccagcgaaaacgttgaaaccaatattcgcattactgaaggtttagcacttcagcagatttacagcggctttaccagcaaaaaaatcgacacattgagcattacaggttctgatttgtatttagggcctaacaacacatattactttgaacctgatgctacaaatctcgagaaagtcagaaaaacgcttcaagagcatttagattatactcctgatacaagcactggcactttcggtaccgaaagttcaacagacgggactgacagctcaagcagttctggcagcactggcacaacaactgacgggacgacgagcggaagcagctattcgaatgacagcagcacaagctcaaacaacagtacaacgaattcaacaactgattcatcctattaaaaaatgcccggtccttttaaaggatcgggcatttttgcgcagaaaaaaactccggcacataagccggagtttttaattccttttcaccagccgtttataaaactttgtaaacggcttaaatttttcattcacgagtcctgtcacttctgctatgatttgcataaaaataatcaaaatgaagataataaacaaagaaagccaaattgtggcacttttaagtacaatcgcactgatactgaaaataaatccaattaaataaataactaagaccgacatccgatgtgaaaggccaaaggccatcagtctatggtgaatatgcgacttatccggcgctgaaatcggctgtttgtttaatattcttctgatgatagcaaatgttgtatcaaaaatcggtacgcctaatataataatcgggataacgatactgaacaatgtgacacttttatacaggcctaataatgaaagaatcgaaatactataccctaaaaacagtgatcccgtatctcccataaagatttttgccggatggaagttgtaaaacaaaaaccccagcgtgctggcaataacgactaatgagagtgacagaatgagcacttttccgccggatagcgccatgacagcaatcgttgacaggccgataacagaaagaccggcagcaaggccatccaatccatcaatcaggttaattgcgttcgtgatgccgacaatccataataccgtcagcggataagccatccatcctaactcaaatcgttctgttaaaaaaggtactgagaaaaagtccatttttaagccagtgcttacaatcataatggctacacctaattgaatcaaaaacttaacttttgcacttaattgatatttatcgtcaagaatacctaacacaataatgatgaatgctccgactgtaattgccgtcatccttgtttctgtgtaaataccggatgcaagcacgcctgcaaccaccccgataaatatggccagcccgcccatgcggggcatgattttgtcatgtacttttcgattgctgggctggtcaactgcacctattttaatcgcaatcctttttacgattggggttatgattaaaactgtcagcagcgagacaataaacgcaacaacaatgcgaatcatgcgttcgtcaagcataaagaagtctcctttggaattaaatgaagtctttatttatatagagaaccgttccttccattataccttctccttagttattataacaagcttcatcaaaaagaaacacgtataatcaaaaaacgcgcatcccaatttataggactacgcatgtttttgaatccctgtatacttcataatttgtctaaataagcaattccaatcttgtgtgcgagcgatgtttcggcgcatttctttataggtttcgtctccgttttgtccgagaactttttcacaagctgctataaaatcaattggatgatcaccttctacatattcgtatacatacggcttttgcatttttgaggttgacggaagattagtgcctacaacaggttttcctgccgctaaaaattcaaatagtttcagcggaaacacagcttgattatacggtgattgtttatatggcatgatgccaatgtcgataagctccatataatgaggcacttcttttggatctgccggaccggtccatatgacatttggaagcctcagcagctcttgaaacgaaacgtcaccattggtggcatccgggccaacccataaaaatgtccaatcaggcttttgcagggcggcggctttaatcattttaaaatcgagcttcggtttaatcccgccaataaaacctaacactgttccttctctcccctgcagtatactgcgatcgggagcttgtttatttgcagaaaacagctcatactccacaccgttttccacagtatgaaccttttctcgtcctgcagtcagttttttgtctacttccttgtgaagataatctgatgaacaggttattgaatctgctcgttgtataattctcagctctgccgatttaatgacttttcgccggaattcagacagcagatttgatcggccgctgatcggcgccgcccataagtcactgcagtcataaatgacctgatcccaaggatacagcgaagacagcagcgggaatccgggaaacgtgtaccataaacagcaacgttcaccgtttgcagaagcaggtgtaagctcatcgagtaatggggagagcttatgtctgtaaaagacatctgtatatcgtccgaaacgaaacatttttttctgcagcaggtctttgacaacgaattgcctgatgccagaatggacttcttgaaattctttaccttgggcacgcggagccggacatacccaaataacttccttcgtttcctcctgagcagctaaaaattctgccagccggtgccttctgtatctcaattggtcttttccccattcagcagtggcaacgatgacatgaatgattgcttcttttgtttccaccttcatcaccttttctctctgtttgcggctataatctttttttcaccgcgttttttgcatattgaacaaaacaccatgttgctttcataaaatgaagccgttcgatctccctgtagacaaaccacgtttttttcgcagccttccatttgttgctggaaattgagttattgacaagccgatattcagccaggcattcattcattccataggcaataaatcctttttttaaaagagacagccatgtggctaagtcctgtctcgttctgatattcggcatttggatctgtcccgtttgctccctgtcaatcatcaccgtcaagcagccgataattgtatttttcagggcgtcatcgtacgtcaggctttccggcgcatgaataaatttatcgagtggggtcccgtcctgcgccattaagctgtagcccgtgaaagaaaacgcacaggagcgctccatcataaactcaagctgcttttccagtttgtcttttttccatttgtcatcactgtccaaaaatgctacgtagcgcccttgagcgcgttccaacgctttgttgcgagcaaccgcagctccggagttctcttccaaatacaccacatgaattctttcgtctattttttcatactgctgtaaaatgtcgcgggtcccatccgttgagcaatcatccacgataatcatttcccaatgaggatggctctgatctaataccgaatgaaccgtgtcttcaatatagtcacgcgcattataggaaggtgtaatgacagatacgagaggtttccaattggtcatgatcacatctccatcgtatgattttaaaaggattccctgaaaaattcaggaatgacaacgaacataaaggcaatcgtaaggccaatcataacgccgagaactgctttctttttcggagacattccgccgcctgctgtctcacttacggtttcggaatcagtaacacttgccgctttcaggttaagctgtgtgtttttgagctcatacaaaaatctctctttatccactttggaatcctcgcttaccgactcgccttcaagcgcgtctatgctgctgcggatgacggcttctctttctgcatacagcttttgatcgtttttgaggaaggtggaggaaatggcttttaagacagattccgttttatccttatcctcgtcgctatagcttaaagtcagtaacgatttggattccgttttgattgtaagcttctctttgatctctgctacatcttcatccttttcatcaggaagcgcctccttcaaaaaggagtcgctctttaatagaagcggaatctcttctgtgctgttataaaccggatgatcatagctccccacagccaaagtatcttcagctgtatagctcttttgatcagcgatctgtgacggcaggatataccccgccgcacctaatataattggcaccgctatgatccaaatgatatttttttttatgcgacgggctattcttatcaatatatcgttcatataagtctccctgctttttgtagtctgttttatctgtacatcggctcaggcatttgtctggatcgccttaacacattcacggccgcgatgacgagcgccataaacacccaatggaaaaataaatttgaaacagagcttgggctgatacttgataccaggaaactgaccatagcggtaataagtccttctgtgatcagttttgactgattttctaattttctttcataaaacttgtaaagcacccatatgaggtaggcataaacggacagatatcccagcatgatgaacaagccaaaattagcaagaatttcaacaagccagttatgcacctctgccacattgtcagtatcatatacagcataatgctcaagataataggatacatttcctgccccgactccgaatccgtatgaatcaaggaaaaaatgccaagcgtttttcagcagatttgcccgagccacatttgatggaagcctgtcatgaaatgaatgcagcgtctgcggggccagaaacagctcccaaaactttgaatagattttgctggcgaaaagaactgcgaaaagagcaattcccgccgccgacagccatatagccattctctttaaaacaggcggcaatacaatgaagatgtagacagcaatacctgcaaaaatgcccagaaggctggctcttgaaccagtggcaaaaattaaatacaacgcacagagcgagagcacaaggccaattgccttgatgtatccattcttaatgtttttcatcatcgtgatgtaaaaaaagaagctgatggataaaaaggtcgcaaagtcattttgattaaaaaagaccgatgtcggataatgctgcttgtactccggtccgctgtacaatgtggaactcgcaagatgatggtgggtgatatgattgtaaaaaccaatgatcatcagaaataccgtcatcaccagccaaatggcataaacaatcatcagccgctccattttttgcacgtacatgacaataagataaatgaagaagattcccattgccaataaggctaaatacttgaggccaactgttaccgacttggcccacagcagagaaacaaggccatatataaaccaaaaggcgaaaaagagtaaaatcccttttacttgcagcccatgccatctttcaatatgggttcgattccgaaccatgccgaaaatatgaaggcaacccgctgcaatgagcagaagccggtaaaggaacaaactgaaaaatccaagatgaatagcgaaaaatgcattatttaaaaaagtgcaggcgatcaaaatatagattacagccataaagagccgttcttttgttgtaaatgcggttgcaagcgtcagtaaaaacaggccaattgccaacaccgcaagcacaacagccatctgcatgaaacctatatctttatggatggctcccagcaataggacgactccaaatatagcagcggccagtaacgctagcgtatggaccgctgatcgtttgatactcacatgtttaacccctttcctgatgtttcaggagccggcggccgagcctagcagccggcagcttcaaccaagtaacactttttctttttataaattgacgcttcccaagtctttagccaattcttcaagcggcaagcccggaaaatacttgtcagagggttccgttccccgaacagcgggacggccgatagagtgataaatgtatccggctgcctgcatctcttcaagtgaaaataaatttctgccgtcgatgatgactggctgttttaagaggttttttacttttacaagctccatttcttttacttccggccaatccgttaaaatcaggcatgcatcagtgtcttcaatcgcagcatacacatctgtgtaatactcgacctgttcgccaaggatcgctgaagcttcaggaatagcaatcggatcgtatgcttttacatgggcgcccagctgctgcagcattgggataatatcaagcgctggagcggatctcacatcgttcgtattcggtttgaaggctaatcccaggactgaaatggttctccctttgacgcttcccataacagtcaaaagtttatctacaatatgaacacgctgcttttcgttcgtttcaatgacagcttcgatgagcttgaatggatagcctgccgattttgcgatttgaagcagcgcggttgtatcctttggaaaacatgaaccgccgaatccaatacccgctttaaggaactttctgccgatacggctgtcaagaccaacaccatcagcaacttttgaaacgtctgcgccaactcgctcacaaatgtttgcgatatcgttgataaaggaaatctttgtcgccagaaatgcattcgcggcgtatttaatcatttctgcactttctaggtttgttttaatgacaggagcatggaatggctgatgaagttcctcaatgatggcagcggctttatgacttgttgaaccaatcacggcacgctccatattcatcgtgtcatgaatcgctgacccttcccgaaggaattcagggttagatacaacatcaaatgagtatctcccctttgaggctttttgaacgatagattgcaccagtttccctgttccaaccgggactgtgcttttatttacgatcactttgtagccgttaagatgctcaccgattgttttcgccgccgctttgacgtacgttaaatcagcttcacctgttttggacataggcgttccgactgcaatataaataatatctgaggcccgaatggcggacgggatatcgttcgtaaaggtcaggcgctgatccagcacatttttttcaactaagtctgcaagccctggttcatagattgggattaccccatttttcagacttctgatttttgattcatcgatatcacagcaaacaactttattgccgatctccgcaaagcaagtgcctgatacgagtcctacataacctgttccaatgacagctatttttttcacagcgctcatccctctcctgtaaaatgatcttcctatttatattggtcgcagtttcttacgattaaacggacgttttcgtgaccgtctgatactgatgatgcaaggccttggcgttttttcctgcgtcaaattgagcctgcacggtttcatacaagtcatctgctacttccggcttccatatttgctcatgttcgtaccgagtgatcgcttctgccaaggcttgagcggatttcggtttaatcagcagatgttggtgctttccgaacaaagacgacactccgccaacatccgtacagataacaggaacccttagcgccagcgcctcaatcacaacagtcggcatcccctcactgtaagaaggaagcacgaatagatctgccgcaagtaaatagtctcttacatgatgattcggcacttggcctgtgacgatatgccccttctgcgtcagcgtcgattttgcgggaccatccccgacaaagactgcctgaggtgggtcctgcagcgattcgatcgcttcagacagttcaaaaatgcctttctctctgaccagccggccgacatagacagccagacgctgatcaagcgggagtccgagtctttctctgatttcctctttcgtctcctcattctcctgaaaacggctgagctgtatgccaattggcaaaaccgagctgtcaaagcccgaaagctttttggcttcttcctgaagcttgtggctgactgctaaaacaactgacgcagaacctacggcacgcttgaaggctttaaacgctcctttgctgtaatgcggatagacattcacatcactgccatgcaaggtcaggacataaggaatttgcgctgactctgacacgactgccgcagccccgcccgatggcatggcaaaatgagcatggatcagatccggatataggccgcgctgtttcatggtttttaaaacggctgatgcgattctccgatgaggctgcgcccacttcagctggccgggaactgcccgatagaaaggccggtaaaccggtatcccctttctaacctcatactccggtctggcatccttttttcgatatgtctttttcagcatgcggacaggcgctgaatgaaaaggccgtgggcatatcacagtgatatcaagcccgagtttttgcagctcttgcacctgtgtctcatgaaacacaccctctccgggtttcatactgctcggatatacgcttgtgatccacaaaatcttcatgacaaacgtccttttcttagtagtttgcttttcgtttgagggtacgcttttaccaaaagaaagagatagcacagcgccccggccgcaactgaaatggccagccgcatttctgcctgcatactgaagtgttcggtactgaggcttacaccaaacgcgatgatgcccatcgccgcagtaatcagaaatggcttcataatcgactggaaataagctgaaaggttaagcttgatgacatatgccaaaagccagcgcccaatcaggaaattaacaacgctgataatggcatacacccatgcgactgtcagcaggcttcccgtctgtacagctgcaaacagtgataatccgtacagcagcagcacgccggaatcccaataaaacgctaagtcagctcttcctttagccagcagcacagatccatttggattcataagcactcttagtattccgacaatcgccagaacatttaggatcggaacagcagcaagccacttttctccgaaaaccgctgtgataaaggcgtctgacacagacacgagcccgattaaaagcggaaacgagacaagcgccagcatttttgtcatattcagaaagccttctctgatcacgctgttttcatatttgttttttgcgaaaacagggaatgccacccgtgtgacaatcggattgatcttcaaaaccggaatggtgacaatctgataagcgaggttataaatccccaatgcttcagcaccaataaaccggccgatcaaaatcatatcgatatttgctcccagcctgttcacaagacgggatgaaagctgaaatgctccaaaagaaaagaaatccttcatgcctctcaaatcaaaaacaaaagcaggatgccaattttttcggtatactgcccaatataaaatccctttactggactgcagcaggacttgagaaatcacgtacgccaaaatcgcatccatcataaaaaccgctatcgctaaatatccgaatgacaatacatttgaaaaaatctctattttgcttaacgtattaaaatgcagctgcttttgcagcatatactgatattgctgtccaattggcgcgatcaaaaacataatcgccagaatccgaactagaaacaccagctcttctctttgataaaatcccgcaatgacaggactgctcacatataaaagaacaaacagcaaaacgcccgtcataatgttaagccaatacaatgttgacagctggcgctccgtcgcgtcgtctctctgaattaatgctgctccaaaacccatatcgagcacaatctgggcgaaaactgtaaccgttgtgatcatgccgacaagcccaaattctgttaaggtcatcatatttccaagcagggcaaactgaacaatttgtatgattgtaatacacatggttgaaatacttgtccactttgcaccgctcatgatttgttttgtaatacttggcatcatattccctacttctttttaagctcagattgatggtgaataatggcattccgttttatcttgcaccatcacccgtccaaactactttacaagtttttaacataatttttaattctaaagtgaaagtcagattgcgaatgtaatataaatcaaatatcagcttttccttcggcgtcatatcgtaaccgccgttcacttgagcccagccgctcaatcccggtttaacagccagacgctgtgtaaagcctggaatctcattctggaatttttccgtaaatacgggccgttccggacgagggccaatcatactcatatcgcctttcagcacattaaacagctgaggaagctcgtcaattctcgttcttctgataaaagctccgatccttgtcactcgcggatcttgcttctgtgcccaaaccgccccagacttctcggcatctattttcatggaacgaagcttataaagcttaaatggtttcccgcctttccctacgcgttcctgcgtataaatggcaggtcccggcgtctccaaacaaatcaaaattgaaaataccgcaatcattggcagcgcaatcgccaacccaatgagcgcaaaccaaatatccattacgcgctttattgccaaataacgagccgtcttttcagataatgtaaaagaatgtatttgctgaactgagaattcacgactcacattcatgcttttctctgcactcactgacacacacctcacgatttgtttgggatgttatgatgacctatgccagtcagtttagcagacggatgttaattggatgtaaatggtatgttaagaagtgtgaattacgtgttttttctgataaatgttgttaatactcttttactattttatatacaagtcctatttgttttaatcatttcatataaaaaagagacaaatctgtgattagatttgtctctttcgattatctgtaataagatactgtgccgtcatgaatagcttgtgcagctttatctttataaaccgcttgcttcaatttacttgcatctgatgcattagtgataaaggcagtttcaactaaaacactcggcattttagaatatttaataacatagaaagcggctgtttttactccccggtctctcgttccaagattagccgctaactttggttgaatttgttcagccagtctcttgctatttgcagcttgatatgttgtatcgtagtacgtctcacttccatttggtgatgagctatcattagcatttgcatgtatactgataaataaatctgcttgtgcagaagctgctttatttactctctcctgtaaagaataaaaagtatcattagatcttgacagtactggaagagcacctgaagtatttagctttgtattgactcttttcgctatatcaaggttgacttctttctcaaggagtccattgccgattgctcctgaatcttgatcaccgtgacccggatcaataaagattgtttcacctacaactggattctttagctgattagcaaccttggtgcttacggcaggagtgtttccgataatcgtaaagtttgacatgtttttacttccaataattttacgggctcctgtagataaattttcaccatttgtaaggataagagattgcttcttcttagctgccagtgtagctcctgcaatagagtcagggtagctgaatccattgcttacatatacgatgcttgttgataaattaagtttttgtacgatatttgcagcaagctcatatctgtttgaaccactaattcttgtaggagaaggtaacttgttgtataccgtattgctgatacttccagtgcctcctacaacaacggtactcgaaattcccttatcttttatcacagacgttgtcgcactatttatagatgttttatttgtaaaaagaattggatacccgtttttcgctgcataaggaatgacggccggagcgtctgcatataagaagccattcaaaataacagcttttgaagtcgcacccatcgcttttgccacccgtgcagccgtatcataacggttgcttcctgcaattcgtttaatacttatccccaaacttttaatctggttagcagtgttagatgaaacagcaggtgttccgcctacaataattacatttttagtctgcatctctttcaatcttgttttcgtttcatatgaaagcttatcagaattagtgtaaagcaatggcgcattcttctggtaagcaaggggtgctgctgaaatagcatctgcataggaactcccaccaacaattacagctgtacttgctgttgaatacatttgctttgatatttgtacagcagtgccgtatctattgcttcccccgactcttttcactgaattatcggccaaagctgttggcacaaaaagtatgagccccagaaaacacattgttaggacttttatataagaacgcaattgatttcctccttaagtggcgttatatcctaaaataatcaataacttgtcagagttgtacctggatagtaaaatttcaaaattgaactatatgaatctccagcttctgctcttgcttttgctccatattgactcattccgatcccgtgaccatatcctttaccgctgattgtgtactttgaagtatctttttttacagtcacataagtacttttaaatacagtcgctccaatcattgttcttaactcacttgttggtacactaatggttgtaattttgctcaagttataggagccagtactgcttttaacaaaatacttcactttcatcgatgctgtttttgcacgctgcccttgtgtcgttccactaaagcttaaatcgtcaatacttgcaattttgacagaatcagcgcttgtttctttatttttcaagatccagttcttaactccggaaagtcttgcagaatcagtttcagtcgctgaagaccaccaagaagaaggcttcgttaagtccaaagatttcgtatctagctgttgttttgacaaagtaagcgtccagcctatttgaggatcctttgtatctttttttgcaatcaagtaaggtacacttgatgaccacacttcattactagcttctgtgtaaccaccattactggaagaataagctgcagttataagagatccattatatttcagaactttccccttcgtttgctctaccgctttattggtattcgaattccaactgtagccaccataaacttgaaaagcggttgtatcaggtacagtagttcctgtttttgttattgagtaggttcttgcagcgacagtctgtgctttaagagcctcaagtgaccagctagcaggcatttcattcggaattactccttttaagtaatcctcaaatggaatattctcatttaccggtcggatatatttagtagactcaatagagaaattaaccgtgccaagatactgctttccatcaagactaattctgtttgaagtagaatagttttctggtttaattcttagggagtttccgtaagttttgatgttttcaaggtttaattttccgctgttgatttttagattataggtgctaccgtcagctaaataaaattcatcagcaagtgaattctcaacttcagcagaaattgaactggtacttccaataaagtcgtatgcatatgtggctttatctttcgttatacttttagccgcagccggaacgctatcttgtttaataaataaaatttggctgtttttcttcgaggcaagcgaagcgcctatcagtacgtctgcatattttgtcccgttcgtcattacgactttatcagccttcaactttagttgcttaattatatttgccgtaagttcatatctggttgatccaggaatcctttgcacagttgaagtttttttaatttggttttctacactatcactgacgctaaatgaactgcctataatgatgacttgttttggcaaattataatccggaagcttgtctttctctgtaagcaaaatagggtatccgtgtgctgctgcatatggagcaatggctaaagcgtcttgaaatactcttccggttacaacgatcgctttatcatagctgcccatttgctttgcaatattttctgataagacatatctattttttccgcttatccttttcacagcgccatatgatttcagcttgttttctacatcttttgaaatgcttcgcgctcccccaatgattaaaatattatcagggttaaacttagcaatttgtctttcagtagtttttgttaacgtgtcaggctgagtaaataaaactggtgcgttcagttttttcgccaatggaataacaggcaatgcatcaataaaaatatctcggttcaccaatatcactgtattaggatttttccactggctgttggatgcaagagtcgcagtttcgtatcgtgaagcgcctgcaaaacgatccgtaacagcaacattatctccagttactttataaaatcctgttggcgatagactgatgctagatttatttccaatataatttgacaatttaactgagatgtttgagtctgctgcaaaagaaactgatggaatcaataataagattgcagcaagtgaacacactatcaatcgtttgcaagatttcaaaatttcaggttcctccctatatcttagttggcacgttcaatatcttttaacagaagctgaccctcatcatttttttcatatgtaatcgtgaccttatctccactgttaaacttatcaagatcacttgtcgattcttcagtgatatcaagactaaccggctcattatctactgttacttctattgtatgagtatcagctaaccctacataagtaccttcttttgtttcaatgttactgtctggcgatacatcttcaccttgactcttttgactattaaccccgcaacccgaaagaagcaatataaagaacagtaaagcaataaattttttcatttttttcacctcattatattttatcgtcaacctattttatattttaaagaaaaattaagaaacaatgaaacttttttttataaaaaacgactattttaggatttcattcttgtattaaatagagttgtatttattggaaatttaactcataatgaaagtaatttaacagacgaggtgcaaaggatgagaaacgaacgcagaaaaaagaaaaaaactttattactgacaattttaacgataatcggacttcttgtactcggaactggcggctatgcatactacttatggcataaagcagcttcaaccgtggcaagtattcatgaaagcattgataaatctaaaaagagggataaagaggtcagtatcaataaaaaagatcctttttccgtcttaatcatgggtgtggatgaacgcgacggcgataagggccgtgccgatacgctcatttatatgaccgttaacccaaaaacgaatacaaccgacatggtcagcattccgcgtgacacgtatacaaaaattatcggaaaaggcacaatggataaaatcaaccattcatacgctttcggcggcacgcagatgacggtagacactgttgagaacttcctcgatgtcccggttgattattttgtgaaagtgaacatggaaagctttagagacgttgttgatacacttggcggcattacagttaacagcacattcgcgttcagttatgacggttattcgttcggcaaaggagaaatcacgctgaacggaaaagaagcgctcgcttatacccggatgagaaaagaagatccgagaggcgacttcggacgccaggaccgccagcgccaagtcatccaaggtattattaataaaggcgctaatatttcttccatcacgaaattcggagatatgtttaaagttgttgaagataatgtgaaaacgaacttgaccttcgataacatgtgggatatccagtccgattacaaaggtgcgcgaaaacatattaaacagcacgaactaaaaggtacaggcacgaaaatcaatggaatttactactaccaagctgatgaaagcgccctttccgatattacaaaagagctgaaggacagcctcgaaaagtaaaacaaaaagaagcttcgcacaatgtgcaaagcttcttttttatttgcctgtaaatgaatccggttgttctttccggtacccgtaatgaaacagcaattcttccacaatccggcgggaagcctctccatctccatacggattagaagcctgggacattttcttgtactcatcaggatcagttaacagctgttttgccagctgataaatgttttcctcatccgtccctgcaagtttcaacgttcccgcttccactccttcaggccgttccgtcgtatcacgcagaacaagaaccggtttcccgagagatggggcttcctcctgcacgccgcccgaatctgtcaatataaaatgcgatttcgctgcaaagttatggaaatcaatcacctctaaaggttcaatcagatgcactctgtcagaatcaccaaaatgcttctgagccgcttcccggacaacaggattcaggtgcacagggtaaacgacttgtacatcttcaaattcctctacaattctgcggatggccttgaacatgttttccattggctcacccaaattttcccggcggtgagcggtcaagagaatcattttatcctcacccacctgatcgagaacaggatgtgagtaaccatccctaaccgttgtgttgagtgcgtcaatcgctgtattgcccgttacaaaaatagagtcggcctttttgttttcttttaataaattgtctttcgcctggcctgtcggagcaaaatgcaaatcagcaatcgcccctgtcatctgtcgattgagctcttccggaaacggggaatacttattccctgtacggagccccgcctccacatgaccgacagcaatttgatggtaaaaagcggctaggcttccggcaaacgtcgtcgtcgtatcaccatggacaagcacaatatcgggtttgatatctttaaacaactcatccaatcttacaagtgcgttagacgtaatctctgccagtgtctgccgctccttcataatgttcaaatcgaagtcaggcttgatgtgaaacgcatctaacacctgatcgagcatctgtctgtgctgtgcagttaccgttacataggaatctatttcaggatattttttcaattcaagcacaagcggtgccatcttgatcgcttcaggcctggtcccgaaaacggtcatcacttttagttttttcatatttgtcacctggttttctgctatagtaaataaattcatactacatattctacatgaaaatgcatcattttaaatcatttcattcttgattcaaataaaatgatataagttttaatattaaggataaagcttgtttaaaaatggtttatccgatatcataaaaatgtgtaaaaacatattgaaaagggtaaatagagaatagtttaaccataaattttttcgatcataaggaaggtgccttttaaatgaaaaaagtacgtaaagccataatccctgccgcaggtctcggaacgagattcttgccggctacgaaagcaatgccgaaagaaatgcttcctatcgttgataaacctaccattcaatacataattgaagaagctgttgaagccggtattgaagatattattatcgtaacaggaaaaagcaagcgtgcgattgaggatcattttgattactctcctgagcttgaaagaaacctagaagaaaaaggaaaaactgagctgcttgaaaaagtgaaaaaggcttctaacctggctgacattcactatatccgccaaaaagaacctaaaggtctcggacatgctgtctggtgcgcgcgcaactttatcggcgatgagccgtttgcggtactgcttggagacgatattgttcaggctgaaacaccagggttgcgccaattaatggatgaatatgaaaaaacactttcttctattatcggtgttcagcaggtgcctgaagaagaaacacaccgctacggcattattgacccgctgacaagtgaaggccgccgttatcaggtgaaaaacttcgttgaaaaaccgcctaaaggcacagcaccttctaatcttgccatcttaggccgttacgtattcacgcctgagattttcatgtatttagaggagcagcaggttggcgccggcggagaaattcagctcacagacgccattcaaaagctgaatgaaattcaaagagtgtttgcttacgattttgaaggcaagcgttatgatgttggtgaaaagctcggctttatcacaacaactctagaatttgcgatgcaggataaagagcttcgcgatcagctcgttccatttatggaaggtttactaaacaaagaagaaatctaaacataaaggctattggacattcatccaatagcctttttttatttcaacatcaaagtcaatgtatgctcttcattatcaactgcgaagacctgatcaacggcctgccgcaaaaattaataatcccagacaaacacactgattgtagagttaaacaaactaaatgaaaacataaatacaaacatgcagattaaatagtaaatatcttgtattcaatgcaagctaagtaaacaccacttgctaaaagaacaatgactaaacaaccagcattacaaaataattaaataaatttgaagcaattacaacagaaggcagtgaactgtcggaaagttcattttggctaccatattaatcccttttaatttaagagccaggccctcaaattcctctattcggtcggcatgtccaaatatatccatccatcatttttatgatttgcagaaatgttcattatctcaattttcacgtttaacccttcgtcgaagagttaactctatagacttatttttttaaactggtcaaaaaaatcagtgtaataatccattgtataatgcacataaaatttgccccatggatggttttcaaaggaattatagcttttatttttaaataaatctatcgcctcgatatcattgaagctatctaatacatatgcgtcaaatttattccaaatcttattataataatcaacatcaattactttgatgttccctccatttataagcaattttttctgatcttctttatcaaaaaagtgatgaacgtttcttgcactatttaagataattttggttttagggcaatttaatctgacgtagttatagaaaagattaaatttctgtttccatagtgcaaaataattttcaaaatgatcttctatattaaaactttgttttttattttgaattgtaaatttataataattcgttttagggagagtccatctgttatttgtaacaaactggttatctgaaatttctacgtagccaaaatgcacatctgcgaaaaagtccaaaatcaaaatgtctggctgaacagatttaatctcggttagaaagctattctcaaaatccgtctttaaagtgtttttttcatgattagacatgttctcattatcaataacaatgtagttaggtttactcattgttgaaataatggacgattggttttgggtcaatacacaatcaaaaaaatttttataatcagcattaaattgagagttaaagttatcacgtgtaacacaactaccataaacagctacttttttcatttctttattccctctttaatattagttcctagactaataatttgttgataaacacgtttacagttttctttatccgtatacttataaaattgatttactctatcaatatatttggcatccattatacaatcgttttccatacaatttatcagcttatcaactaaagcatctttatcagcaattacttctccaaaccccattgaattgtaatcaaaataccctttttccaagtgatttttttcgtattggaagtaaaaaacaggttttttaagataagcaaagtcaaatgcaacggatgaataatctgtaactaaaatcgcactattattgaaatgatctcgataactttcattaatgtccgcaatcctcactgaactatttttgttgaaatctttcaactgctgaacaatatttggatgcgggaagaatacgatctcgtatcctttttcattagcctcattaatgagtttagcatcatttaataaattattaagttcattaaaataaactgagtttttaaagagtggtgagtaatctcttttccctgtttgcggatttatttttcctactaaatgatttctccatgttggcataattaatatctttttatgattatgattaacaagcttatcaaatctaggaaatccagttagaattacttctctttttgaataattataatgaccattaattatagactcatactcaggttgagcggctgtgataaatagtctaatatttttcttatacttattaagccatcccgaaatatcatctttcgtaattccatgttgaagaaaaacaaagttaaatttaaataagtccttataatatttcctcatattcacaaacgggttgactacataatcatctgcatgtgaagagataatttcatcggcaagtaaatgtaaaaatttgtgcttaggtgacccgtatgcaacaactggtcctatttttttcagcctgttataatctggactatctttactgataataaaatattttttgatgccgtcattctgctgcattgcatattcaaataatgcttcagcattatcatctgccttgttgattctatccataaaaagccatactcttttatttttctttattttatagaggtgttccataatctttcttacatttgatgctttctcagcacctattttattaaaggtcttaaaacgtctttgagcccgcttttcttttgctctaataatctgatttttatcttttagaactactaaattattaagtttatgatcgaaataaatccctataccatttttggtatagaaatcaactatatgtttatccagcgggaataatcgtccaaagttaatttttacttttattagttttccatttgatgaaatcatcatttcaatattcgagttatttgcaagctcaccaactgggatatcaaccttaaagcccaggtactctttaactggcttatttaagcaatataagttgtgtactgttctatcaattttttcggcatgatatatcttgtcattgacacatgctttcacttctaattctgcggcatcaaataatgaaccaaaattaccttcaagggttaaaatccccttttcaatgcttaatagctccattgttatagcttcatatctcatagaattaattaatttctctttaaaatataaattcacattacgattcaaaaagatctttttaaatacattttttttatttcgatatttcaatttgattaaaaaatattttctgtgcaagtttagagatttttgttcaaagattatgtcgtcatctataaatgcaagtattctttctagcaagtcaaaaaactcttcaacttccttatccgtcaaaacatcagttctgtcttctatatttattctccactgcaagtcataggcaatcatatactgaatgtatcttggaacgtatcctaaagttgtaatactatgattaattaattctcgagagaaattcttcaaataatccacataccattttttatcatttttacctgtttgagttgcagatgacgcatcttctcttcgtcgataattatattgtccttctgacacaataccgtatacttggcgcttcattataattttagtcagccattcactatcttcagcgtaggccatatcttcattaaaaaagtgatttttaacagcttcttttttcacgaatgaacttggtgctgataattgaattcctgtatgttctttcaagatatgaactagcctagttttatcaaatttataatttaataagtgtggaccacttgttttaccaaacatcatcattggaatagaaactacatcgactttagaataattcttttcaaaaaaatcatatacttttaaaagggttgaaggggacaatgtatcatcaggatctaagaaattaatatatttacctttggcatattttaaaccctcattacgcgcactacttgctccgccattctccttatcgataaagactatattttctggatacgcttctttatactttaagcaaatttcccctgatgcatcaacacttccatcgttgactaaaatcaactgtatatgatgctcaaaatcaagtgcctgatcaattatgcttgttattgcttcatctaaaaattcttcaacattgtaaattgccattataatagaaaagaaaaaattcttttgttccaagtttttcaatctcctttaatttatttctttttactcaagggtattagattctaatcaacttttgaaatattctagttaaaacattaactttttgaagatcaattaaattgttgtctttttcaacaataaacctaaaaaaagtaactcctatcggaagttttaattgatatgaagaatattttctatccctaactgtggttccccaaataactatgttcttatgttcttgcttgtttattaattttgcttttctcaattttcttccataagagatataaacactatttttatcgttaatcacagactcttcattactcaaacttaccattagctcaattgaaaatttattgactttccatgaagtaataacgattttttcattttctagtttccctaattgaataagtctgttgacaggataaccccatcgtttaaatgaaatgagatactcttttaaatatgttttcatgttttgttttacaattaaattctcatctatatatttcaaaacgtgaaataattccttaaaaaactcactctgttctatcttatttagcacttcataaaccttgttattgtttttttgaaaaataaataattttaaatgattaagaattaaacattgaacataaggtataacttcgctgtactcttctaatgatcttttaaccatttcaccatatccatttgtaagtaaaaaagtatacctgttttttttagaccacgaagtgtctactagagaatcctcactttttctttttctatagaaatatttagcggcaggaataaggccatatttttgttctttaattaaaaacgtattaataaataaaacatcttcccaaaaatccattttttcattaaaagcaagaccaagacgttctattgctttttttcgaaaaaatgttccacctatgtgataatgaatagcagtgtaattatcagttatgtttacaatgctttcaccacttttaaatctataattaagtgagtgttctccatttttattatcgaagaaaaatagcggcagtaccgctaaattaatatcggtatgcttttcaaaaaactttaatacctcagcaatagcatttagtgagactttgtcatcagaatctataaaccctatatatttactattatcacaaacttttaatccattatttcttgccatactgacattcggttcatcttgataaataattttaatattattcggatatgcagttgcgtattgttcacatatgttttttgaattatctatgctattattttcaatcaatattatttctatgtttttttcaaaattaattgtctgatcaataatactgtcaatggcctctcttatatataatcccgaattataaacaggcattacaattgaaaacaacatctcaagtgctcctttaaaataataagtttttatccgagtagtcttccacaactttttttgaatgaatcatcttttccaactaacaaaattggtcataaaatgaagtaatgttttcatcctgtttatagtctcttgttttatgtatggattcaatttacttttatgttgttttaaaaagaggtcccggagcacacttttcaaaatcataataaaaatctcttagtttatctctataaaatttaatatcgggaacataacgcctttttaaaccgacataataagcaaatactgaagaatagtctgttattaatatatctgatattaagtataattctctaatatcattatgatcagaaaaatcataagcaaaacccatgtattcagttaagttaatattttcagatacaagatagtggacccttaaaataacaatatattcattacttaattggtctttaagactttctaaatccaacaccatattaaatttatatttacctttaacataaaatgagttatctctttttattttcagcattccttcattgctattttttttatataaaaaatcgttcctcggatagccctattcaataaacgtctttttaaactgaaacgcatttttaaaaattttcgtagagtaagcattaagggaaatgagataaccgcatttactgacttctataagaaagtttcttttatattattcagtcttcatgccgggcatatgtactttatccatgtcatttgcatttaggggagttccgtgcccagtgtgcacatatgtagtgtttctcggttttagaacctatagcggcaagtggctgtttgttatccaatattttgatgtagccaaatacaacagccatttgagagagattttttcaaataattctcatctgaatcatcaaataaatctttgtctcttttatctacactccaaaatatccatattcatatttattcttattttcctcaagatactcgaaaattgctcttggattacagctgaattgtttgcctgaatagctttcgaagatgagtaatctttcgtttctgggcaaaagcccaattattctaaaaataattgagtatacactgaccaatagtcttctatatttcattaaaatctttgatttcattttagactctttaaatatcaaagaattaaatacttatctcagcaaacaagaaaaaaagaagcaactgaatgattcaagcctcttttagttagtgcgtctataaactagccatgtgttttttgatttggtagttgaaatggcttttgttcttgaaaggtaaactttccagcagcttcatatgtccgtagtgaaataaatcaaatgttccgtacgttatcactttcttcatgagataacatcaccttccaactgagagtaccagaaaaaaaccaaaaactttaacaggttgtttatcatttcgacatattttttacgtaccattaataatgaacaataatagcataagttcctataaaagttaagactctttaaaaatgttaatcaccagcatttttttgtatcaccgttgtattgttgtatattttttgcaggtccaatatcttatctataccctttataacgagttttctttttcggaaaaatcgattcttttgtcgcgtttttaagtgaaacgttttctttctgcaacaccatttattttgtacgcccttctcatattaatacatcgtcaaaacatgaaggaattgtaatacgaatgttaaaagttcctaaagatttttgcggtaagatagagtaaaacacacttgtttttatagacatatagatgaaagaaaggttgatacgatacaaacgaaacctattaattaattagataaagaaaaaaccgagcttcttgagaaagtgaaaaaagcttctaatctggccgacattcactatatcctccaaaaagaacctaaaggtctcggacatgctgtctggttcgcgcccaactttatcggcgatgagccgttcgcagtcctgcttggagacgatattattcaggctgaaacaccagggttgcgccaattaatggatgaatatgaaaaaacactttcttctattatcggtgttcagcaggtgcctgaagaagaaacacaccgctacggcattattgacccgctgacaagtgaaggccgccgttatcaggtgaaaaacttcattgaaaaaccgcctaaagacacagcaccttctaatcttgccatcttaggccgttacgtattcacgcctgagattttcatgtatttagaggagcagcaggttggcgccggcggagaaattcagcttacagacgccattcaaaaactgaatgaaattcaaagagtgtttgcttacgattttgaaggcaagcgttatgatgttggtgaaaagctcggcttcatcacaacaactcttgaatttgcgatgcaggataaagagcttcgcgatcagctcgttccatttatggaaggtttactaaacaaagaagaaatctaaacaaaaaggctattggacattcatccaatagcctttttttatttcaacatcaaagtcagtgtatgctcttcattatcaactgcaaaaacctgatcatctgtattcacaagaaaacgcttcttgctgctgtcatacaatacatcgctatcacttaaggatagtgacgccgggttgataggagaaatgttatgaaaaataagctctgttgctttatcattctccagtacataactgattttttcataatcaaaattcagcgtttttctgccgtcagccttatttccttcagtataaccattcaatttcgattgaatgctggtgctgctgtctcctaggaatttcagaaagtattcataggaagatgctgcgttttgcgagacataagacgtaaatgcagtggcatgcaattcagcgtgtttcatgttagttgcaacagcgctctgtttcacataataagagtgcccgtcaaactttattttcgctgcttgtttgccttttgcagctaccgttacttttgtaccgaatggcagtgtaacgtcagccttctgtttcaaaccctgatccttataagcagccgctttttcatttgctataaacccttgcttattgattgcagttaagcgttcctctgacttgccctttgcatcgccatgatggttcttcacttcattttgcggaatagcgccaaacgaagcaattgtacgaagcggggcattaaagaacatcgttcccgccatgaagacagtcagaatagacaaaatagcaatttgaatggcattggccagtgatttcggctttttcttctttttgcggaaacgggcaaacgcttcaggatcttctttcttcctctcttctgtctgctcttttttatatgtctctttttcttttttcgatagcttattaaaccagtcaataaacgctttgtactctttcacaaccgtttttgtttcatcaaacatacgaagctcgccatagtgcatccaagcaacacggtcacacatcttttcaatctgaccgattgagtggctgacaaagaaaatcgtttttccttgctttttaaactcatttattctgtctacacacttctgataaaacgtttggtcccccacagaaagagcttcgtcaataattaaaatgtcaggatcaatatgcacggagatcgcgaaaccgagacgcgacttcatcccgctggaatagtttttaaccggctgattaataaaatcgccaatctcggcaaattcaacgatgctgtcatacatatcatcaatttctttattggttaaccccatcatcaaacacttgagccggacattgtcccggcccgttaattggttattcaaaccggcagcaatcgcaatcagcgacggctggccgttcatttcaatttcaccgctggtcggcggaataattttagccagcaggttagacatggtcgattttcctgacccgtttattcctacaaagccgattgtctccccttcatacacgtcaaaggagacattccgcacagcaaaaaaaccattatccttagccggaaaaaacaatcctttaatcttgtccgattgttttttatacaaatgatactgctttgaaacatttcgaaacgaaacttttagtttcatcgtaaaatctccttacgtattaaagaaagtcaacaaacttgtctctgaatttcatatgcaggatagaacctactaacaataaaaggaatgtgaacaaccaaaagtacagcgtgtacttcatgtcatggaaaaaccatgctccatctaagaagctgttccggaatccttcaataatatagaatagtggattcaacttcagaacaggcactaattcggggtggctttgaccgagtttcgcattaacatcccaaaaaattggcaacaagaaaaacaaaagtcttgttacggcctgcagcaaaaattgataatctctaatcagcacactgatcgttgagttaaacaaactaaacgaaaacataaaagcaatcatacagatgaagtaataaatatattgtaaccaatgcacactcgggaacacaccattaactaggagtacaatgatataaatcaccatcatgatcatataactaaataagttagatgcaattgccacggacggtagagaactaatcgggaagttcattttagccaccatattaatgcgcttaaatacactatttgatccatcaagtatagttggactgatgaaaaaccatgggattaatcctgccagcatccaaataataaaaggcacttcgcccgctccggttgtcacaggaccgccctttctaatccccataccaaatacgaaccagtaggccagcatttggataagcggatttaagaactgccataagacacctaaataattcatttgatatttagacttggtttcataagccgccaatcttaaaattaaaggaaatgacgttatttgctctctgagtatacgcaacaaatcattcattttttatcttccttagacttaattgtttttgggaatctttctgtttaaaatttgaaagcaccgctgattattgtaacagatcctgcattttttttcacttctcaacaagtatctaaaaagctgccgaaatatcgacagctatacattttataaaataacctaaattattcagctttaaatacagtattaacaaccttttcagatgaacgtcctgactctaaatagcaaaacttatcatagaaaggaccaaaagaaaccggaagcttataatcaggcgatgagatctgcttgatagcctcaatcgtttcttcagtagtttttaccaaaggaccaggagcttctttttcaaaatcaaagtagaaaccacgcaacttatcccggtaggtctcgatgtcagggacaaagaatagcattggccgttttaaatttgcaaaatcaaagaatactgaagaataatcagtaatcagcaaatcagaaaccatatacaattctcgaatatcctcataagcagaaaaatcatatgcaaatccttcaaaaggacctaaatcaaaattctcagctaccagataatgcattcttaagattacgatatattcatttccaagctcttgtctaagttgatgcaaatctaaatcgagatcgaacttataacgcccttttgcataaaactgatcatctctccatgtaggggcatataaaataacctttttatcacgaggaatatttaacctactctttatcaatgatattgtttcctcattattatcattatgaagaaaatcatttctaggatatccagattcaatcattgtcttgttaaactgaaacgcccgtgtaaagatctcagttgaataaccatttggggaaatcaagtaatcccaattagaagcttccttgataaaattccttttatattttttggtgtttgtaccaggcatatggacttcttccatatccattgcaagtctttttaaaggtgtgccatgccatgtttgtaaatatgttgtatgactaggtttcggaatccataatggaagccggctgttaacaacccaatactcagctcttgccatagcgaagagccattttaatgagaggcgattaatgtaaggaattcccttttcatcaaaaggcgctgaatattgtttatttacactccaatacattttatactcagggtggttttcccgcatatattcgtaaatcgctctcggattacaactgtattgtttcccattaaaactttcaaaaatgactgttttccttttaactggcattctgctagccatcatgaatagagatttgtatgttttagtgattaacttgtttctcatttttgtgatcttttttatttttgatactaatctcttcttctttcctttaataaagtatttaatccttgttttcaggctatagtcgtttactctgatacctagagtctgctttttctttttcttaaagacttcataacgaactggtgtgttgtttgttttaataatacttactaatccttttaatttgttttttcgatctcctaaaacaagagcagtgctgttgaactgaatatccgttccttcatcgtcattgcatatatactccataaaaagacgataaacataacgtttttcatttgagaaaggaatttctttcaaaggcactttcacttcaaaatcatacagttccggaacaaaaccatctgctctcatgttttccaggccatgtgtttttctttctagcttgattggaaatttttcctcaataggtgtttctccacccttttttaaaataaggttcaagttttttatccgatattgattttcggaactcaggtaccccgcataacctgttatgcttatttcttcagagctaatctcgatttgatcaaatctgatgattttggcctctcttttcaccttaatagaaaagttgcctttatcagttgtataaggtaaaatcaaaagttctgtggtttgatcgacatgaaaggcgcgctcaattgaatttacttcagcagaaagacgcttcaagagtggttcctgctccgcatcttcatatttttttcgaaattcgacataaaaatcatatgtttgtcccatttcaacaggcataggcaaaacatgagcatttatctcagttttatactctaatgagccagtgttttgaagcggaaattcagattccgttcctgaacgtctctctttcagctttaaaaataactggtaatcctctaaaaattggtgttctgaatcaattgagattaacaattcaagacttcctaaattgtttttcaagcttttcaaaatacatttaatcacagtgttttcaatcattacttttttctgctcctctgtataaaagctctttcctttttgcttccttttattagtgtcaactactaaggacattacccaaaatattaactctcttttatttccgtgaccctccaagagaaattgcctttaactgttgtatagggctctactctatagccattattagtatctatactgtttcctgacaattttgtttcttcactcgaaagtcttcgcattgttttaatatggccatttgcattgaaaacaatataaaaatcaataacttgggttttattagcagctatcttttcaatatttacatctttttcgagatcaattacaaacagttgatcattttgtaagtttgttgaaataatttcagccttattctttctgtccaagcccactaaacgtatttttttaatatcattatgatcaaaattctcaatgtcaatttctattttagttttatcaaaatcctcagtataggaactaatagaaggatctttttttccaacctttttagagaacttctctctttctattcgcacctcaatcatctgattaagagcaaaagcccaattttcaatatagttgggtcttgaatatttttcagccattttaaaagcttgttctgaaaatttttgatgagtactttcatctttcatcaaagagataatagcttgacccaatttctctatattatactgttcaatgacatatccatttgctccgtcagtaactaagctccttgctccgtaatcataatcgtatgttacaactggacatccattgctcagtgcctccatatttgatagaccgaacccttcaaaatgagaggttgaaatggttagccaagctttttgaaactctgagtcagggttatccgtatagcctttcaaaaagacattattctgcagtttggtatcttcaatttctttttttattttttcgaaatcttcacccgatccgaatatatcaagttttgcttcaggaatttctttcacgactaaactaaatgcttttactgcatgtatcagatttttcatagatgcaagtcttgaaataatgacagctttgtatttttcactcggcacattcaatacagcgggatcaagaggcttatcaattgtatgcggagtaaagaaaaacgtctcttgttcccctgaaatcaatttaaaatcttctagctgctcctcagttataaaaaagacagcatccaaattatacatctgactaaatacttctttatagcgacccttaatttgatatttattgctgccgtaatgcttgttatgaataattgctccataataggaagaaggtgattttttcactttaaagacatgtttgtcttgcggtctgctgtccactaaaaacaacttaggtttatcattttgtttttgcagatattctatccaatattgacgcagttccgattcatcttttacttttatctcaccctcaagggagtaccaaataatatgagataattgaacatctttttcttcattgttccatacatagagtttgtctaaatatacttgattttggtcattaatatattcctgcagatacatcttgtttagctgcacatcataatgagtaacgagaactaagtttccgttcttcgtatattcctctctctttatgagctggtttttatcattccaatagtcgacgtaccggatagtttctccatctccgtagtaaattacagacatttcattgttcttcttaccaaacaatctcgacacagtttttgcaaattttcccattccaacttgcttttttatctggtcaaggcctatcctttcttcgtatgatcttttcccatttgttctaacacttaaaaaatcatcgaatagattaataacacttgtgaattttttatcaatcttaccgttgctgtacaattcatcaatttttgaagacaactctaaatcaaaacgaaacgttaagaaaaaggtgttttggttacactcttctccaaataattttgaacgcaataataatgatttcgtcagaccgccataattacttggcagtccaccagagataaaataataatccatgtcaggaatttgttttatattagattcactcaccgcatgtaaagacaattttttactccctttcggcatctagaatatatgatcattgaaatttatatctacccggatactttagtcacaaaaatcaatgtaagcatcaaaaagtacttcttatttcaataagaagtactttaattagatattgaaccaatgatatcaggatcctaaattataaaccagcaatttcctctttgatctttgttgtagagatgccttctgttcttgggaggtaaacaacctcacactgatctttgagaaagtcaaatttaccttcccagtcatcccccataacaaaaacatcaatattatgatcaataatatcttgctttttttgctcccaattcttttcaggaattacttcgtccacatatcgaatggtttctaaaattaatttacggtgctcatagctgtgataagcttttttttgcttttgtaaattgaattcatccgttgaaatagcaacaactaaataatcaccaagctgctttgcacgctcaagcaatttaatgtgaccccaatgcagtaaatcaaaagttccatatgtgataacttttttcatttaaagaaacgctccttcctaatgttaaacactattaaaaacactactgacgttagcgattaaattctaaaaacctgtttgtattccttatatcgacatatttctcgtatgtcttcactgatcattaattatagcataccgcctaaaaaaggttaagtactcatgaggagaaaaacattccaaaatatgtaattacactcagactccattggcaccaaggtctgttgttcattcgttcattcaattgtaaaattggaaacatatttaaatttaatgtaaagataatgttaatcctttgttgaagatttatgttaaaatataaggtagcttgattttgcttttagaaactctcggtttttaactatataaatagaatcttaaaggaaggaggagccagacatgcaaacagagactattcacaatattccttatgttaacagtaacttaacatcatttatcgattacctagagaaacattatattgatcaaaagattggtgctgtcatttccacagtcaaccctgaaattgcatttgcagctattaaagatcgggactactttgatgtactatcttcttcaaacttcattttgcctgatgggatcggtgtagtcatgatgtcacgtttgactaacaacaggcttcagtcccgaatcgcaggttacgatgtttttaaagaacttctgggcgttgctaacaaaaagaaaaaacgcatatttctgtacggtgcgaagaaagatgttataaaaggtgttgtatccaaaatttcttctgaatacccaaacattaaaatcgcaggttattcagacggttatgttcaagatcgcaccctagtggcaaaacaaattgcaagagcaaatcctgacatggtattcgtagctttagggtatcctcatcaagagaaattcattcataactacagacacttgttccctaaagccgtatctataggtctaggaggaagctttgatgtatttagcggtaatgtcaaacgggccccttcctggatgatacgtttaaatttagaatggttctaccggttaatcttgaatccatggcgatggaaaagaatgcttagcatcccaaaatatgctttaacggttttaaaagaagaaaaaaacaaaaaaactttctatccaaagcctgaaaaagatcatacaaaacagatttaaaaacgaaaactttcaaataaatggatgataaaaatgaaaataagatcactactggcgaattgctatttgtattttttatcagcaatcgccttttttctgcaatgggtgaaacctgaaagcaaagtgaccctcctgatctcattcgaagcaaacgcaaaagcgattcttgaggaatatgaacaaggacaatactcttataaacttaacatcctgtatacccagcaggcctctgctattgccgagagcttcccgaatgtagatgcatatttattacaagaaaaaaaccctatccatctcattaaagctgtatacctaatgtttaacagtaaagtgatcataacagataattactttctattaacaagtgtgttaaataagcggaagcaaacgaaatgtatccaagtatggcacgcaaatggctcactcaaaaaatttggtttggaagacattacaaacatgcaacggacgaaaactgatattaaaaggttccaaaaagtatacagttcgtatgattatttaactgttggctcagaagagatggcaaatatcttcaagaaatcatttggaataaaggataaccaattattaaaaataggtgtacctttaacagacccttattaccgagaaaacaagaaaaaaatttcagatactctaaacatacaaagaaaaaaaataatcctctatgcaccgacgtttagagattataatatgcaatcaattcaattgccttttacagaagaacaattaattcatcagttaaaagaagaatatgttttatttgttaagctgcatcccgccattcagaacaatattgatattaaatattccagtgattatattaaagatgtttctaattatgccttgtttgatctactcatggctgcagacatattaatcactgactattcttctgttccctttgaattttcgattttaaataaacccattcttttttatacttatgatttaaaactttatcaacagaagcggggattggttgataattatctttccataatacctggaagagcctgctatgacagtgaatcattaataaatgaaattcaaaccccatttaattattccaaaataaaagttttttccgatagatggaataagtattctgatgggaattcaagccaaaatttattgaatttcatcgaaaatttaataagctaaatgatgacacttgttcaaaacagaacaagtgttcttttttctcttgactaccgaacgtatgtttgctttaatgtaattagttgcttatggcagcaaataataatagaggtggtaaatttatgagaaaaaaagaactgtttgatttcaccaacatcacaccaaaattatttactgaactacgtgtagcagacaaaaccgtacttcaatcattcaatttcgatgagaaaaaccaccaaatttatacaacccaagtcgcaagtggattaggaaaagacaacacccaaagctatcgcataactcgtctatctcttgaaggtttacaattagacagcatgctgttgaaacatggaggtcatggtacaaatattggaattgaaaatcttaatggcaccatttatatttggtctctatacgataaaccaaacgaaacagataaaagtgaattagtttgtttcccatataaagcaggcgcgactttagatgaaaattctaaagaacttcagcgattctcgaatatgcctttcgatcatagggttacacctgctcttgatatgaagaatagacagttggcaattagacaatacgatacaaaaaataataataataaacagtgggtgacaatctttaacctggacgatgcaatagcaaataaaaacaatcctctttatactattaacattcctgacgaacttcattatttacaaggtttctttttagatgacggttatttatattggtatacaggagatacaaacagcaaaagctatccgaatctcataactgtatttgattccgataataaaatagtgctgcaaaaagaaattactgttggcaaagacttgtccaccagatatgagaataacttccgtgaaccggaagggatctgtatgtacaccaatcctgaaactggggcaaaatcattaatggtgggaattacaagtggaaaagaaggaaatcgtataagcagaatttatgcataccattcttatgaaaacttcatgaatcatgtacctatgcttcgatcccctttattaaaaaccgtggggcaccaagatacacctccagaaagatttcaaccatttatgcaaaccttcattttagagtataatgctcaaaacaaaaaatggatggttccgacttcaggttatttaccatcttacacatcaaatttagtccgaaatattactatcaatgcagatggaaacttgcaagtcacattaaatgaacgctatattagtttactgcatcaatcgatagaaggagatttccgcttaaaacaaaaggatatccgaatgggatcctggtattttgctggcggagaaaaatcaaatgtgcttgaaataggttttatgaaagggagtacaaaaatcagacccgatgatgcagccatctcaaatgcttcaagaatgagtatttttatgattgttgcggacaagattgaggtgtgataaacaaataggctgtagctattaaatagctacagcctatttgcaactttctaagttttttatcgatattccggaacatcaaaataaagtgtatagccgtccagcaatgaatacaggctgtacatgcggtttacttgtttgtacgcccagccgatgtctgttgcgtattgatgtgtcgctgtagctgaccatctcattttgtacagtgtgtcctgattgtaagctgtgttgtggatatacgatgagcctatgaatttagctccgccgataatggccgcttcaggtgtgaaccagccctgctcgtacgcatatttggctccgtagtaattcggattgctgtcgtatgctccaattccatacatgttgtatacggtttttccgttataggttaatccattggctaaggcggatgtcccgtttcctgtttcaagaagagcgtgtgagattaaatacagttcgttgatgctatattgattggcggcatcgataaatgcctttgctctccctgtcaggatgcctttacccgcaagcactttctgattgacctcagtaacgctgaggcccgctgtctgtgacagcttgagaaattggaagtagtatttgctgtctctggtaaagttatttggatccacgtattgaactacttcatcactgcttgcgtttcgccagcccaaattgatcttagcccagccgtttatctgtccgatgattttcactttatcgccttttttaaattggccgatcacgtttgtcgggctgacttccggcgttgaccggatatttagtacatcagccgtaacggttgatgttgctatattaatgtacgtgagcgatacgtaagccgctccgtctgtttgcggacttactgtcatttgtttttggaccatatcacgaagcgagagattgtaatttgttttcatgatttgcgggccgtttttgatcttcacgatagatgatgtccatccgtataattgttttagcttcgttgatgccgcagcagctgtatcattgcctgtgaactgctcatttacgctgattttataaagcgtattgcttttcgttgtgtagctgggggttacacttttcgatttaagataggttaacccattattcaatgctgttttgctgctgagctgtgttgtcacgattttgtattgtgtatatgctgtctggcctgtttttgatgttgtgactgcgatatgattttgtttgaaaaatgttaaaacgcggtcaatctcttcttggctgataatagcttcagttgtgatttgatagctgctcgcagctgtctgaccggttttctggcttgctgctgatatatgattcgatttgaaaaacgtgagtgcctgattgactttcgtttgatcaagcagagattcggttgtgattttaaacgtgccagctatttgttttttgacggatttcgcagaagcactcagctgatttttctttaatatgttcaagccctttgtgacttttgcttgatctgatgtttcttctgagatgagctgatattgattttctgctgttgatccagctgctgtttttgcagcttttacttttttctgagcaaagaaggctgctgctttgtttgcttgctgctcgcctaaaatctttgccgtcgtgatttgataagctgcagacgttgtcgtttttttgacgctggatgacgtgtaatgccattttttctttttaaagaaagtgtctattttttggagctgctgttttgttatacccttcatattcacggtatatgatgtgctttttccaacctgttgataactcccggatacgccagtgtttttcttgatttggctgatggcgtcctttactgtactcagccctttgaaataagctgattggacattgtatgactcaacggttgttttttgattgatggacttgtagctgcctgtgatgccagtgctctgtttcagctgctgcaatagagttttggcattggcttcacctgaaatggcggcagttgtaaacgtataataggcttgccctttcactgtttcctttaatgatgcctgcagcccagattccttttggaaggcgtttttgatctgcgctgctctgctgtctcccacgattgtgccagactgaatggttgtgacagacaccgtgtgtgtgatgggctgatacgagcttttaatccccgtttgcttggccaggctctggataagcgccttgacttttgtctcatcagcaatgtctgatgtcatgacgttcatatagggctgagctgctccgtaagcttttacagcgccagccactcccgtctcctgtttcagctttgctaggatagtgttggcctgtttttctccggagatggcacctgacgagatggtgacatatggctgtttgcttccaacaggacttgacgttcctgtaatcgatgtctgtttggcgagtccgctcagtattgctttcgcttctgattcgctatgaatgcctgaggcggaaatttggtaggtcgttgttgtgcctgaagcctgataggatgcatcccagccagtatctttttccagtttggcgacagcttgtgaggcttggctttctgtactgaacgtattcgacggctctactttatatagtgagtagtcggtatacgcggctgcctgggcagaaccagacatggcaaaaaaggcaagggacgcggcggatagaagcataggtgcgattagtctctttttcattccttctcctctttcttattctatgagtatataaaactagtttatttatcggcacgcggttgcttcatttataggtgaatcacttccattttctaataaaaaaaaaacttaatctcgaagtgagattaagtctaaatatgagacacgataagggtacaaggtccttttatcgtaaaatcgggcatttgagccggcaaaataaagtgatcgccttttttgagcggacatgttttgtcctcatacatgagcaaaccgcttccttctatcacgctgcaaatcagaaaggattcatcctgagccatttcagcttcgccattgatgtcccatttataaaccgaaaaatattccccttggacaaatgttttaatggttattccttttctagattctgtcgattcatctatatacccgtccacatggggaaccgtggccgcattgaccgctttcgcaaaatgaagctctctcggacttccgttgctatcaagacggtcataatcgtacacccggtatgtggcatctgaattttgctgagtctctaaaacaagggcccccttgcacaatgcatgcagcgttccgctcggcacataataaaaatcacccggtttaattttgattcttcgcagcaggccctcccagtcaccgctgttgatcattgtgacaagttcggtttttgagcgggccgtatgcccgtaaatgatttctgcgttttccttacagtcgataatgtaccagcattccgtcttgccgagttctccctcttcgttttctccggcatagtaatcatcagggtgaactttaattgacgtatcttccttcacatccagcagctttgtcagaagcgggaaccgatccccctctacgccgccgaatacttcacggtgttcttcccaaagctcgatcaatgtctttcctttatacgggccatttgcaacagtgctcggtccttttggatgagcggaaatggcccagcattcccccgttgattctgaaggaatactgtatccaaatctatctcgtaaagcggttccgccccagattttttctttaaacacaggcgttagaaaaatcggtgattgcgtcatgatccgtacccctcccctgtaaataactgatcatcattttcccggtgcgcccctcttacaaacgcccgtataagctgtcttttttccgatgacaacatatgtacaaagcatcatcttttcattaccccttcaaagaaaacgcttcctatctattatatcacgtcgaaaagaagctttgtttcagccttttcctcgataagaataattctccttttttgatacaaattaataaaaaccgtcaatctgtttacgaaggagagaaactatgcaaatcgactctgatctccagaacaatttagacaaactgaaaaaaacattgggacaaaacgacgatatgatgttttatacatttgctttcggagatagcagacaaaaggcgtgtttactgtatattgacggtctgacagagaataaaatgctggcgcaatacgtcatttctcctttacaaaaagaggcgttagcccataaggaatgctcgattgaagacttatccgccttttttttcggctttcaccacagcgttgtttctacaatgaaagaaatagagcagctcgttttttcagggcaagccattttgctcgctgatggctatcgcggaggattagctttcgacaccaagtcagtcgcaacacgcagtcttgatgaaccctcctccgaagtcgtggaacgcggccctaaaataggatttattgaaaaactgcggacaaacacggcgcttttgcgtgaacggacgagtgatcctaatctcgtcatcaaagaaatgacactcggaaaaaggaccaaaaagaaaatcgctgtcgcttatattcaggatatcgccccagattatgtcgtcaaagaagtgtttaaaaggctgaaatcagtcaatatagataatttgccggaatcggggacgcttgaacagctgattgaagacgaaccattttcaattttccccacaatattaagcacagaacgaccggaccgggtcgaaagttctctattagaagggcgagtgtccatattagtggatggtacgccgtttgctttgattgtaccggctacggttgacgaatttattcattcgcccgatgattacagccagcgctggatcccaatgtcacttgtacgccttcttcgttattccagcatcctgatcaccatttatttgcccggtctgtatatttctctcgtttcttttcacaccgggctattgccgactagaatggccatttccattgcaggcagcaggcttaacgtaccattcccgccttttgtagaggcctttatcatgatctttacgatcgaattgattcgagaagccggattaagattgcctaagccgattggacagacaattggccttatcggcggcgttgtcatcggacaggcagctgttcaggcgcaaattgtcagtgcgcttatggtcattgtcgtttctgtcacagcactggcatcctttaccgttccttcatacgcctataactttccgctgcggatcattcggatcggggttatgataagtgcaacagcgcttggcatgtatggcgttataatggtttatctgtttgtgatcggccatctcatgcgcctgaaaagctttggacaggattacattatcccgatcatggcgcagcctggacaggatttgaaagacacagtcatccgtattcccacgatgtttttaaaaagaagaccgacacgaaacgatcccgaagataacatcagacaaaggtgatggctatgaggaaatcagagcataaactgacatttatgcagacgctcattatgatcagcagcacattgattggtgccggggtgctgacccttccccgctcagccgccgaaaccggcagtccgagcggatggctaatgatactgctccagggcgttatttttattatcatcgctctgctttttttgccttttcttcaaaaaaacagcggaaaaactctttttaagctcaacagcattgtagctggaacattcatcggctttctattgaatttatatatctgtctatatttcattgggattgtttgctttcaagctcggattttgggagaggttgtcggattctttttgttgaaaaatacgccaatggcagttgtggtgtttatatttcttgcagttgccatctatcatgtaggcggaggcgtttattcaattgcaaaagtatacgcttatatttttcctataacccttattatttttatgatgcttctgatgttcagctttcgcttgttccagcttgattttatccggccggtatttgaaggaggctatcaaagctttttctctttattcccaaaaacattattatatttctccggatttgaaatcattttttacctggtcccctttatgagagatccaaagcaagtgaaaaaggctgttgctctgggcatcgcgacttccacattgttctacagcattactttgctcattgtgattggctgtatgactgtggctgaggcaaaaacggtgacatggccgaccatttcccttattcacgcattagaggttccgggtatttttattgaacgatttgatttgttcttacagctgacctggacagtccagcaatttgcctgtatgctcggatcctttaaaggcgcccatatcgggttaacggaaatctttcatctgaaaaataaaaacaatgcatggctgctgactgcaatgctggctgcgacgtttttcataacgatgtatcccaaggacttgaatgacgtgttttattacgggacgcttcttggatatgctttcttaattgtgattacaattccattcttcgtctggtttttaagctggatacagaaaaaattagggagggggcagctacaatgaaaacagcaacaaaattctccgtcatgttttttatgctgctggtcctctgcgggtgctgggatgtcaaagatatcgagcaactatccttcgccagagggctggcgatcgatgagacagatgatcaccagtacaaactgacgtatcaaaaccttcttccccaaagcgaagacagccaagcatccggaaaacccgaatttgtcaatgtgacgtcccacgggaaaacgattctggaagcagtcagtgatgtatccatcaaggaccctcctgtttatagcgatcatttaaaagtcattcttctgggagaaaaactgatgaggaatcaaaatgtagaccaagtcctcaaccactttatccgagatgatgagctgcggcgaagcagctatttgatggcagccagagggaatgcagctgatgttctcacaaaaggaaaccccaatcagcagcagccgatgccctccgaaaaactgattgatttgacaactcacagcggatataacggtaagattatgataccgctgcgcatcggaagagcttctgtctactctcagaacgggtacagttatcttattcaagccgtgaaaaacgaaaagggaaaagccaagtatgacggagcaggcattatcaaaaggggcagcaataaactcgttgggtttctttcagctgatgaaacccaaacactgtcatgggtcatggggacgatccaaggcggtgtcatgccgacgacagataaaggacatccgattacgtttgaaatcaaaaagtcgaaaaccaaaattaagcctatcattgaaaacggaaagcctatctttcatatttctgttaaaacgaagggcatcctgacagaagaccaaaacccgaatgaaaactcctttagcaaaagttatttgcacaggctggaaaacatttttgaaaaaaagcttgaacgagatgtaaagcaggtaatggataaactgcagcacgagtataaaaccgatccggtctttttatcagaccacataaggattcaacaccctgactactggaataaagtaaaagggcattgggatgaaatattttctgagactgattttaagtacgatatttcttttaaaatcattaactttggcacggtgggaaagtaagcaatcaaaagggtgcgcatgatcgcgcacccttttttatgttccgacagtctgctgttttccggccgatcctccctgtccgtttttgtcccgtaaatcctgctcaatttcttcaaggctttttccctttgtctctgtcactttaaatcggacaaataagaacgccatgataccgatcgcggcataaatcaggaataaataactgattccgatcgcttccattaatattggataggttaatgaaacaatcagtgtcccaacgtgcaacattaaggtcgaaacaccggtcccgattcctctgacgtgaagcgggaacaattcaggaagcatcacccacacaaccggtccccagctgaccgcaaagacaacgataaacacgcctaaacaaatgacggtcgtccatgaggcagccggagtgttatcgaaaaagagatttactaaagcgagaacgatcaagctgatcaccatgcccgcattcccgaatagcagtaacggctttcttccaatcttgtcgataattttaatcgctactaatgtcatgagaacattgactgtgccgattccgaccgtgcctaaaatcgaagcggagtttccgaatccgacgtttgtaaaggtctttggcgcatagtagatgatcgtattcgttccgataaattgctgcaaaaaagcgagtcccaaacctgcaataagcgctgggcgcacccatggatcgaacagctccttcaggccgccttcatcctgcttttccgcttcttttatatcatgtatttcctgatcaatatcttttgtgccacgcaatttttcaagaatgttcttcgctttgctttcttcgccattcgtgaacagccagcgcgggctctccggcataaacaaaatgccaataagcaagagcaatgacggcacagcagccaatccaagcatccagcgccacgcttcggcatcggcaaatatgtaattgacaatgtaagaaagaaggatgccgaccgtgatcatcagctgattcagtgatgacagcgccccgcgtttatgttttggcgccagttcagataaataaaggggcacgattgtcgtcgatgttccgactgcaagtcccaaaatgatgcgaaacagcaccatgactcctgtatttggggccagtgccacaccaagaccgcctatacaaaacagcagcgcggctgccataattgctttttttcttccgaaacggtcagtcagcttgccggccgctcctgagcccaatatcgccccaaccagcaaggagctgacaacaagaccttctgtaaacgcgtttaagcctaactcctttttcataaataaaatagctccggaaatcactccggtatcatagccatataacgcgcctccaagagctccgaaaaaataaagccatatatttgactgctttttcataaagatgactccctttctccatcagctgcaatgacattgtctgtgggatttttttagaaatcttttagcctctttttccggccattaaacctttttattttgctgatcataagttttccaatcatttacttgtatttttttcaatgtcgccgaaacattttacctgctgcggcgtccaatataaggtgattcagtacatcatcgttatcaattttcaaaaacaagaacttataaatataggaatatttatcgaaaaatgtctttcgagtagttgccccatggcaaatagaatggtacgcttcaaatattaaagaaacgtgaggtattgatatatggaagaacgatcacagcgcagaaagaaaaaaagaaaactaaaaaaatgggtgaaagttgttgccggattaatggcttttttaatcattgcggcaggctctgtcggcgcctatgcttttgtaaagctgaacaatgcttctaaggaagctcacgtcagccttgcacgcggagaacaatctgtaaaacggatcaaagaatttgatcctggaaaagattctttttctgtattgctcttaggaattgatgccagggagaaaaacggcgagaccgtcgatcaggcaagaagtgacgcgaatgtgctggttacatttaatcggaaagaaaaaacagctaaaatgctgagcattccgcgtgacgcctatgtaaacatcccaggccacgggtatgataaattcacacatgctcacgcttacggcggcgttgacttaactgtgaaaacagttgaagaaatgctggatattccagtcgattatgtcgtagaaagcaatttcacggcttttgaagacgtcgtaaacgagttaaatggcgtcaaagtaactgtaaaaagcgataaagtcattcagcaaatcaaaaaagatacaaaaggtaaagtcgttcttcaaaaaggaacacatacgcttgatggggaagaagcgctcgcttacgtaagaacacgtaaagcggacagtgaccttttacggggacaaagacaaatggaagtgctgagcgccattatagataaatcaaaatcattaagctcaattccggcttatgatgatattgtggatacgatggggcaaaatttaaaaatgaacttatcccttaaagatgccatcggcctgttcccgttcatcacttcattgaaatcagttgagtctattcagctgacgggttatgattatgaacctgccggagtctattatttcaaattgaatcagcaaaagctgcaggaagttaaaaaagagctgcaaaacgatttaggtgtataatgaacgggatggcgattacgccatcccgttttacatatttccttgttgaaaattatcaaagtaacgtttagccttaatttatatggattatgtttcacaggcaagctgaacatactacacgaagcagcttcatttttaaggaggttcccctacatatgaaatgtattgcgattgatctagacggaacattactgaataaagaaagcgtcatttctgcggaaaacagagaggcgatcaagcgggccgttgatgccggcatcctcgtcaccatttgcacgggaagagcgacatttgatgtaaaagcgctgctggatgacttggacatccctatcattgcagctaatggcggtacgatccacgacacgggttaccgtttgatcagccggacattaatggatcaggaagccggtaaagcgattgctgattacttactttcaaaaaacatttactttgaggtatatacagatgaccatctgctttctccttttgacggcgaagctaagctgcacgcggagcttgacattctaaagagcgcaaacccaaacgagcagacggatgaattgtggcagggagccatgactcaattcaaacagtttggcattaaaccaatccctcatatcgaatcggtttttgacggcggtgaaaacatttataagcttctttgcttctcctttgatatggacaagctgaaacaagcgaaggaagaactgaagcatcataaaaaactggcgcaaacctcttcaggaaaacatattatcgaaatcctgccggcctcgtcaggaaaaggacgcgcgttaacaaagctggctgacctatacggaattgaaacacaggatatctatgcgatcggcgatagtccaaacgatttgtccatgtttgaagtcgccggacaccgaatcgccatggaaaatgcgattgatgaattaaaagaaaaaagcacctttgtcacaaaaagcaatgacgaaaatggtgtggcctactttatagaccagcttctttcaggacaatatgcataaagaaaagactccagagattggagtctttttcttttattgcacccgtatacttcctgcgtatttatccttccaatatgtgctcgtgttcatattggtgatggtcacgccgtttgataatgtaacgtgaacaacttgtccgtttccgatatagatggagggatttaagcttgttgattgaaagaacacaatgtctcccggcttcaggtccgccttctcaatcttagttccggcattgtactggcttattgcgtatcgaggcagggaaataccggctgctttctggtagacatattggacaaatccagctgtatcaaatcctgtctcaggtgttactccgccctgtttgtaaggcacttctccgacataaagcgtcgcttcggaaacaatcggattttctttcgggattgtcaggttgtcaaatcggcgaatacccgtcatcttcgatttccagtaatcctctgacaaataggaaatggttactttttctgaccggcttgcctgaatgaacctgcctgcgcccgcataaatgcctgcatgtgaaattcccgttttatacgtattgctgaaatagacgacatcaccaggctttatgttctgaggggctaccttctcgcccactgcccactgctgttcggctgatcgcggcagataaatgccgagtgcctgttgaaacacatattgcacaagccccgagcaatcaaagccctctgacggcgtgcttccgccaaacacatatgggacaccgatatatttttcggcctcctgaacgacaggaacatcagccgttgccggatcggcagcgattcgtctcgccccgatataagttccgctccaatagctgctttttttgtaattggtgatgataaccccttttgactgtgtactgtgaaccatttggccgtctccgatataaagggcgtcatgtgtcggaacagtgccggtgcttccctctttcttgaaaaacaaaatatcacccggcttcaggttttccggctttacagctgttccgattttatactggtcgtttacagatctcggcagatgaatatcagccttactgaacacatattgtatcaatcctgatggatcgaaaccctcttttggcgtttccccgccatatttatactgatatccaagcaggttttttgcttcactgacaatcaattctgatgatgtatcagcttccgcaatctccgcttttgtcataattggaaccaaaaaacaaatgataaccgccacaagcaaaaacttcttccagtttgccagtgtgttcacttttattatctcctcctctttttgcagttttaacatcggtatttttttgaatatgttaagagactttttaatatttttacagaatgaatatgctgggcaaataaaaagagagtgtctcctcagacactctcttttttgaattatttattggcgtttaccggttcttcctgctgctggattttattcatttccatatcaatcttctgtttttcctgatctgtcagctgatcattgaatttaaaagctgacataaacatgaacacgatggctacggcaacaaacggccagatggctttgacaaatttcatctttatcactccgtttatttagattttagtttgtcactatgatcaatatcaaacgtcagttttccgtcttctactttccaagcgaaattagagtctttcgtcagttcgcgaataatggttttctgtttaaggctgtcttttttcacaggtgcaggtgtcgcttcatggatatcgatcggtgtcacttcaaagcggcctgttccatttttcttcaggtgatactgaaccagtgcactgtctcttgttctcgtccagccttggtcaaagacaaagttgccgaggctgtagaaaatgacggttccgttatatacttcaatcggttctaagacgtgcggatgatggccgacgatgatgtcagctcccgcatcagacatggctcttgcaagctggcgctggcggtcgtttggatcattgtcatactcttggccccagtgtgactgcacaacaacgatgtccgcatgttttttcgcttctgaaatcatagggatgaagatttcaggatctgcgggcagcacgcccggcgtattctttttagccgcgaaacctttcccggacacatcggtaaagccaagcgttgcaattgttaccccgttgactttctggtacgaaattttctttttcgcatcacttaagctgtatcccgctccaacgatatcaaggttttgcttcgcaaattctccaagcgtatctttcatgccctgaacgccgtaatccattgcgtggttgtttgcgctgttgagaactgtgaaattcatgtccttcaagactttcactgattccttattcgtctgcagatgaatctctttatctgcttgtttataattcttttgataggttaccgggttttcaaagtttcctgctacataatccgaagctctaaagatcggttcaacatattgaaaaatactgtctgcccctttttgctccgttactttttcaacatagcgtcccatcataatatcgcctacaaatgaggctgaaagtacgtcgtcagaatacgttttgaccttcggcgtttccgcttttcccgcccacatgaaagcgaacataaggacaaaaacgatcggaatggcaataaatacgtgcttattggttttctttttttgctgttttgtcagctttagcagcttttcatgaaagctcagttcttttttcatcgtttgacacaccttacattaaattaagtagtaaacaaacatgatagcaaaggtcgctccgctcaatagcagcgtgcttccgaacgtaatggttaaaccttgtttctgaatggtattggcaattaaacctggcacgatgatgccgattcctcgaaattctgcgatttcaaatggtacaatcgggtatagaaaatcaaacgcgatttttaggacgatccctgttatcagcatggcagcgaattttctgcgtccgtacaaaatcataaatttggataaaccgtatttcacgataacataagtgagcaagctcactagcaaaacaagtaaaataaagaccggctgattaaacacaagtcctaaatatcccggtacaacaagtcctgccggcacgatccctgttttttccgcaaaaattaaactgagtagtacacctaaaattagtgcgatgtataaatctgatccgaacatgtttgcatttccccctagcttacgagctgcttaaccttgtattcgtggattttttcaattaaaggctctgcggcaccatgaatattgccgacgccatatatgacacggttgtgcattcttttctttaacaattccataatttcatctgttgacttatactctagatcatgcagtttgtctgcaggaattttgccttcttcgtaggcttttacgaccggttctgttgtttcaccgattaagatcagttcacttgcttcaatataaggcaatacgtcatttgcgaattgctgtgtccgatcgacacggtctgcgcggcagttcatgatgatgatcggatcatcggtcgggtaaccgatttcttttacacgtttccatatattcaaagtagaagaagcgtcgtttgcggcaaacccattaacaaagtgcccaggctcgctcggactgatcagcggaagaattctcattgctcccggatctggcggcgcattcagcattcccttaaatgctgtttcttcgtcaatgccgagtgcttgagccacacccagcgccagagaagcgttatcagggaataccatgtattcaaatttacgtaaatactcatctgtaatttttgagttatcagcaatgatgacttttgtgtttcgttcttttgctttttgtttaaagaactcggtatattcactatctgtaatgacaagatggccattataaggaattgtagcagtaaacgcttctgcaatttcatcaagcgtcggccccatgacatccatatggtcttccaaaacattcacaatgacgccgatattggcctgcagaagttcttcctgaaagatgatttgataatctgggttaacagccatgcattcactgacaatcgcgttagcccctctttctactgtttctctcatgacttctttttgctctccgatattcggcccctgaggtttccgtttaatcggcttttcctccggtgtgtcccagtaaatcattcttgcatctgttcctgttgtttttccaacagtcttgtaaccggcttctattaatattccggttgtcagccttgtcacagtcgattttccgcggatgccgttaatattcacccgaacagggagggcatcaatgtttttctgatgtcgtcgtttttctaatattccgatgaccagtatgacagcacaggctataatgagtaaccacattgcttttcgacatctccttctatattgttgtaaattcattcatcagtatatagaatcactatgaattctcaatcggcattatgtaacataatcttccctaatcgactaagccaaacttctcttttgaaagagattttatacctacaaactgttttctatttttggaaaacagcaggacttataccttatcacttttttaaaaaattgaagagaatgcgctttcatttttctcctgatatccttctggacgtatagtcacaccctgctgtttgtatttaatatgcatttcaaatcaatctttttttcagcctgtgttatcaagcatttcctgctatcatgcgtgtttccggttcttatgaacacaaaataattttatcctgtttcttaaggacaaggtcataatgtcatcctttctgcatggaataagcaatatgaggcccattccaaaatgactaaggaggttcgagatgaaaacgctaaacatacgagtccgaattctctaacataattaaacattttctgggatgatagtcttttctgtttctcaccatttacaggtctaaacgcatgactttgaaacaattttaataaaacttaatatttgttcaagaaatcttcatccatatttgtgaagactttgtcaaaaaaagagtgaaaaccttaaatttttcaattatatatacaatttacaagtagatttcttttgatatttttattgctaacttcggattgttcatgataatctatatatgtaaacggttacataaacaaggaggagctgttttggctacaattaaagatgtcgccggagcggcgggcgtttcagttgcgacggtttcccgcgtcctgaatgataatggctatgtacacgaagaaacgcgaacgcgtgtcatagcggcgatggcgaagctgaactattacccgaatgaagtcgccagatctctatataaaagagaatcccgactgatcggacttttgctcccggatatcacaaaccctttcttcccccagcttgcccgcggtgcggaggatgaattgaaccgggaaggctatcgtcttattttcggcaacagtgacgaggaattgaaaaaagaacttgaataccttcaaacctttaagcaaaatcatgtcgcaggcattattgccgcaacaaattacccggatctcgaggaatacagcggcatgaattatccagttgtttttctggacagaacactggaaggggctccttctgtgtccagtgacggctatacaggaggaaagttagccgcccaggctatcattcacggaaaaagccagcgcattacgctcttgagaggacccgctcacctgccgaccgctcaagaccgctttaacggcgctttggaaatcttaaagcaggctgaagttgattttcaggtcattgagacggcttcattttcaattaaagatgcacaatcaatggcgaaggagctgtttgccgcttatccagcgacagatggtgtgatcgcgagtaatgatattcaagccgctgccgttttacatgaagcattgcggcgcggaaaaaatgtgccggaggacattcaaattatcggctatgatgacattccgcaaagcggacttctgttcccgccactttctacaattaaacagcccgcatatgatatggggaaagaagctgccaaactgcttttgggtatcatcaaaaaacagccgctggcagaaacggcaattcaaatgcctgtcacctatataggaagaaagacgacaagaaaggaagattaagatgcgtaatatttgtgtgattggtagctgttctatggatttagtggtcacctcggacaaacgcccaaaagccggtgaaacggttcttggcacgtcatttcagactgtgccgggcggcaaaggagcaaatcaggccgttgccgcagccagacttggggcgcaagtgtttatggtcggcaaagttggagacgatcattatggaacagctattttgaataatctcaaagctaacggcgttcgcactgattatatggaaccggttacacatacggaaagcggaaccgctcatattgtgcttgctgaaggcgacaacagcattgtcgttgtcaaaggcgcgaacgatgacatcaccccagcgtatgcgttaaacgcgctcgaacagattgaaaaggtcgatatggtgctgattcagcaggaaatcccagaagaaacggttgatgaggtgtgcaaatactgccattctcacgatatcccgatcatactaaacccagcaccggcccgcccgctcaagcaggaaacaattgatcacgctacctatctgacgccgaatgaacacgaggcttcgattttattccctgatcttaccatttccgaagctctggcgctttatccggcaaagctctttattacggaaggaaaacaaggcgtccgctattcggctggcagcaaagaggtgctcatcccgtccttccctgtagaacccgttgatacaaccggagccggtgatacgtttaacgcagcatttgccgtggccctggctgagggaaaagacattgaagccgcattgcggtttgccaatcgtgccgcttccctttctgtctgctccttcggggcccaaggcggaatgccgacaagaaatgaagtagaggagctgctttcatgaaaaaacacggtatactgaacagccatcttgccaagattttagcagaccttggccacactgataaaattgtcatcgcggatgccggactgccggttcctgacggcgttttgaaaattgatctttcactgaagccgggtcttccggctttccaagatacagcggcagtgctcgctgatgagatggtcatcgaaaaagtcattgctgcagctgaaataaaagcatccaatcaggagaatgcgaaatttctagaaaatcttttctctgaacaagagattgaatacctttctcacgaggagtttaagctgctgacaaaagacgcaaaggcagtcataagaacaggagaatccacaccatatgccaactgcatcctgcaggcaggtgtacttttctagaaaggaggatgaaacatgcagattgaaatgaaagacattcataaagcattcggaaaaaatcaggtgctgtcaggcgtttcctttcagctcatgcctggcgaggttcacgcattaatgggagaaaacggcgccggcaagtccacgcttatgaacattttgacaggcctgcacaaatcggatcatggtcaaatcagcataaacggaaacgaaacgtatttttccaatccaaaagaagcggaacagcatggaatagcctttatccatcaggaactgaatatctggccggaaatgaccgttcttgagaatctatttatcggtaaggagatatcctccaagctgggcgttttacaaacaagaaaaatgaaagcgctagcaaaagaacaatttgacaaactctccgtctctctttctcttgatcaagaagccggcgaatgttccgtcggacagcagcaaatgatcgaaatcgcaaaagcgcttatgacaaatgccgaggtaatcattatggatgaaccgaccgcagcgttgactgaacgtgaaatcagcaagctctttgaggtcattacagcgttaaaaaagaacggcgtctccattgtctatatttcgcatcgcatggaagaaatttttgcgatttgcgacagaattaccatcatgcgtgacggaaaaacggtagatacaacaaacatctcagaaactgattttgatgaagtcgtcaaaaaaatggtcggacgggagctgactgaacgatatccaaaacgcactccttctctcggtgacaaagtattcgaggtgaaaaatgcctccgtaaaagggagttttgaggatgtcagcttttatgttcgttccggtgagatcgtcggtgtttcaggattaatgggagccggccggacagaaatgatgagagcgctgttcggcgttgacaggctggacacgggtgagatatggatcgctgggaaaaaaacggctattaagaacccgcaggaagccgtgaaaaaaggtctcggctttattacagagaatcgcaaggatgaagggcttctgctcgacacctcaatccgcgaaaatattgccctgcccaatctgtccagcttctcaccaaagggtctcattgatcataagcgggaggctgaatttgtcgatctgttaatcaaacgcctcactatcaaaacagcatcaccggaaacgcacgcacgccatttatcaggaggaaaccagcaaaaagtggtgatagccaagtggatcggcatcggaccgaaaatgcttatcttggatgagccaaccagaggtgtggatgttggcgccaaacgagagatttatacgctgatgaatgagctgaccgaacgcggcgtcgctatcatcatggtgtcatcagagctgcctgaaattctgggaatgagcgatcggattatcgttgtccatgaaggcagaatcagcggagaaatccatgcgcgagaagcaacacaagaacgaattatgacacttgccacgggagggcggtaatatgaaaacggaacaactgcaaacagaacaaaaacggattcacttcgacggagtcatgcaaaaactcggcccgtttcttggtttatttattctcgttatcattgtatctattttaaatcccagctttcttgaaccgctgaatattttaaacctgcttcgccaggtcgccattaacggattaatcgcgttcgggatgacctttgtcattttgacaggcggcattgatctttctgttggcgctattcttgccctgtccagtgctttagttgcggggatgattgtgtccggtgtcgatccggttctcgcgatcatccttggctgtatcattggtgccgtactaggcatgatcaacggattattgattactaaaggaaaaatggcgccctttatcgccacgcttgcgaccatgactgtgtttcgcggactgacgctagtgtatacagatggaaatccgattaccggacttggcacaaactacgcttttcagatgttcggacgcggttactttttaggcattcctgtaccggcaattacgatggttcttgcctttgtcatcctttgggtgcttcttcataaaacaccattcggacgccgaacgtacgctatcggcggcaacgaaaaagccgcgctcatttcaggcatcaaagtgacgcgcgtgaaagtgatgatctattctttagccgggcttttatccgctcttggaggtgccatattgacttcccgcctgcattcggcccagccgactgcgggagaatcgtacgaacttgatgctatcgcggcagtcgtcttaggagggacaagtctttctggcggccgcggacgcattgtcggcactttgatcggggtcctgatcatcggcacacttaataacgggcttaatctgcttggcgtttcatcattttaccagctggttgtcaaagggattgttatcttaattgcggtattattagaccgcaagaagtcagcttaggagggttttcacatgaaaaaggctgtatccgtcattttaacgttatcattatttttgttaactgcctgttcgcttgagcctccccaatgggcaaagccgtcaaactcggggaacaaaaaggaattcaccattggcttgtccgtctcaacacttaataatcctttttttgtctcattaaaaaagggtatcgaaaaagaagctaaaaaacggggaatgaaagtcatcattgttgatgcacaaaatgattcatcgaaacagacgagtgacgtggaagatttaattcagcaaggtgttgatgcattattaatcaacccgactgattcttcggcgatctcaacggcagtagaatctgcaaacgcagtcggtgtgcccgtcgtaacaatcgatcgatctgccgaacaaggaaaagttgaaaccctcgttgcttccgataatgtaaaaggcggtgaaatggccgcgacgtttattgccgacaaacttggaaaaggagcaaaggtggcagagcttgaaggcgtccccggcgcatctgccacacgggaacgcggctcaggattccataacatcgcagaccaaaagctccaagttgtcacaaaacaatcagctgactttgaccgcacgaaaggcctgactgtcatggaaaacctgctgcagggacatcctgatatccaagctgtttttgctcacaacgatgaaatggcgctcggtgctctcgaggcaattaacagctcggggaaagacatattggtgatcggttttgacggcaataaagatgcgctcgcttccattaaaaacggaaagctgtcagccaccgtcgctcagcagcctgaattaatcggtaaattggctacagaagcagcagatgatattttgcacgggaaaaaagtgcaaaaaacaatatccgcgcctctcaaactagaaacacaaaaataattgtctgatgtttaggaacctgcgataacgtgaatagagatatagaatgaattatttctcttacgtgaggagaggaacggcatgaacaaaccaacaaaactattttcaacattagcacttgcggctggaatgactgcggcggctgctggcggcgctggcacgatccatgctcaacagccagaaacaacggtaagcattgatgatttatacagttatccgattgattcttatttggtatcagcagaggctctaaatgtcagaacgaaggcttccgcatcaagccaaaaagccgatacgctgcacttaggagatagcctaaagctgatttccttctcaaatgctgactgggcaaaggttcagtataaaaatggaaaaacaggatttgtatccactcattacattgttaaagcagcgacaacggtaaaaaccaaaacaaaaacaaaagtatatacatccgctgacggaaagagcattaagactcttccagcagacacaagcgtttcttttttaggctggagtaaaacgaataaaggcggttttgattttgattgggtattcgttgattacggcggtgcgacaggttatatgaaaacaaaggatttacacatgacaaaataactgagagggattccgcatttatgcggaatcccttttattatgaattgatttgtcacattcccaagatatttctcaggaaatattgtcgtatgctgtgtcgaaaccttacatgatcatcaacatttttgttcacgctaaaaagcggaggtgtaaatatggatcaatttgaagcagcatatgaatcgtataaagcccggcaaacaactgtcgatcaagaaaatgttccatctggaaaagaagaaattattgcggttagaagaaatgaggaagacaatattatcgcagtgaaaaccaatacaggaagagagctcgactatcctactgcgctgtcagaagcaaaatcaggaaaactcgctcatgttgatgtcttccataaatacgggcgtgacattttgcgaagtgaaccggacggcatcaaggaaaataatctgtctgagctgccggatttttaaacaaatacagccctgccgtatgttcgacagggctttcttttaaacaaaaggctgctgaatgtattcggctaaccgttttgcactgtgtgaaatatcctctgcagctgcataattcacgccatagaacacatatggaggcagatacttcatgccgatcagattactcgtggcctgaaatggtttcaatagctcactgatcgagtaatgatttgctccgcccgcttgatatttttccgcttcgctccctgttgatacagccagcatcagctccttgccatgcaaggcatttccttctgaaccaaaagcccagccataagtcagcacaagatcctgccattttttcaagagcggcggagagctgtaccaatatagcgggaattgaaagacaatccgatcgtattcctcgcacagctgctgttccttcgcaacatctatcgcttcatccgggtattccttataaagatcccgtactgtgatattgtcatgtttactcaattcctcagcccacgccttattaacaactgaggtctccatatgaggatgcactgccaaaaccaatattttcatcagaccacacctttactgttttgatgttattttatctaaaatcaggaaaagagccaaataaaaagaaagccctgctaaaaggggctttctttttttcttttattcagggcttccttcagttgtttcgatatctttcgcaaaatcagggttatccagattcgcattaaagaaatccgctgtgttcggaagtctgagattcatgttcattttttgagaaatcgtaaccgtgcaatcctcaagcacatagtcaaaaacgtgtccgcctgaattgcgtccttcgtcaatgaagtgcaggtgatagccagaaacggcgattccgtttgcataagctggtgtcaagaaacctacaatcgttcctctcacgttgtcgaagttgaaaatcggctgtgttttaaccgcttcaaccattggcacgtaaggtttttcttgaagttctactgttcttgtctgcacctttttaaacaatccgtcaatgcgaattgcataaaataagtttctgcttggcagcatgctgttgatctctttttcaaagtcttcgcgtgtcattttcgcatcaattttgtgcgtcatgtccggtgtaaagaacgtaaatgaacagaacggtgaacggtctccattttggaccggtgtcgcggttccgtctgagcgaagacggtaaaattcgccgtcaaacccaatcagctctccgtcaagcttgttaaaggttccgataccgaagtctccatatttcggaatctctgacagttcaaaatctccgtcatatactccgtctaatagagaagtcattgttgatacttgataaatctggctcacaggctgatctttttgaccacggctgagcacttgaatgttgctttctcgtttcatatttcccttcactccttttatttagtgctgttcataaaacagtgtcgtgatgcgcagagtgctagagagcttttgttttcataagttccccgaattctttcggaagcttgtcacttgctaaattaatgttatcactgtagtcaaccgggacatcgatgatgacaggaccttcagcgttcatgccttgacgcagaacatctgccagctggtctggtgattctacgcgcaagccagttgctccgaagctttccgcatatttcacgatatcgatatttccgaaatcgaccgcagatgtacggttatattttttcaattgctggaatgcaaccatgtcatatgtgctgtcgttccatacaatgtgtacaattggtgcttttagtcgaactgctgtctctaattccattgctgagaataagaaaccgccgtcaccagagacagaaaccactttttctcccggtttcaccaatgaagcgccgattgcccaaggaagcgcaacgccgagtgtttgcataccgttactgatcattaatgttaacggctcgtagctgcggaaataacgtgacatccaaatggcgtgcgaaccgatatcgcaagttactgtaacatgatcatcgactgcattacgcaactctttaacgatttcaagagggtgcgctctgtctgatttccaatctgcaggcacctgctcaccttcatgcatatattgttttaaatcagaaaggattttctgctcacgctctgcaaattctactttcacagcatcgtgttcgatatgattgatcgtggacggaatgtcaccgatcaattcaagatcaggctggtaagcatgatcaatgtcagcgataatctcgtctaaatggataattgtccggtctccattgacattccagaatttcggatcatattcaatcgggtcatagccgatcgtcagaacaacatctgcctgctctagcagtaaatcgccaggctggttgcggaacaaaccgatacggccaaaatactgatcctctaaatctctagaaagggtaccggcagcttgatatgtttcaacaaatggaagctgaacctttttcaaaagcttgcgaaccgctttaattgcttccggtcttccgcctttcatgccgaccaaaacgacaggaagttttgctgtttggatttttgctatggccgcactgattgcatcatctgctgcaggaccgagttttggcgctgcaacagcacgcacgtttttcgtatttgtgacttcattcacaacatcttgcggaaagctcacaaaagcggccccagcctgccctgctgacgctattctaaatgcatttgtaacagcttccggtatattttttacatcttgaacttctacactgtattttgtaatcggctggaatagcgccgcattatccaaagattgatgtgtccgttttaaacgatctgcacggatcacgtttccagcaagcgcaacgacagggtctccttcagtgttcgctgtcagcagacctgttgccaagttagaggcacccggtcctgatgtgactaacacgactcccggttttccagttaaacggccgactgcttgggccatgaatgctgcgttttgttcgtgccgggcaacgataatttcaggtcctttatcttgtaaagcgtcaaataccgcatcaatttttgcacctggaatgccaaatacatgtgtgacaccttgctccactaagcaatcaacaacaagctccgcccctctgtttttcacaagggatttttgttcttttgttgcttttgtcaacaccctcactccttattatgcattttaaacgtaaaattttaaatatcttgtgataagtttcactatacactctttggaaattgacctccaatatcgattcgccttatgattaatatgtaatacgaattattaacctatggaaaggaatgcatattgaatggagcttcgccatcttcaatactttatcgcagtagccgaagagcttcatttcggaaaggctgcccggcggctgaacatgacgcagcctcctctcagccagcagatcaaacagctggaggaagaagtcggagttacgcttctgaaaaggacaaaacgatttgtcgagcttaccgcagcaggagaaatctttttaaatcattgccgcatggcattgatgcaaatcggacaaggaattgaactggcacagcggacggcccgcggcgagcaaggccttctcgtaatcggttttgtcggatcagctacatatgaatttctgccgccgattgtccgggaatatcgtaaaaaattcccatctgtgaaaatagaactgcgtgaaatatcctcgtctaggcagcaggaggagctactaaagggcaacattgatattggtatacttcatcctcccttacagcatacagctttacatatcgaaaccgcccaaagcagcccttgtgttttagctttgcctaagcaacacccattgacttctaaggaatcaattacgattgaggatttaagagatgaaccaattattactgttgctaaagaagcatggcctactctatacatggattttattcagttctgtgaacaagcgggcttcagacccaacattgtccaggaagccacagaatatcaaatggtgattggtttagtcagtgccggaattggtatgacatttgttccttcctcagccaaaaaattatttaatttggatgttacttatcgaaaaatggaccaaatacagcttaatgcagaatgggttatcgcttaccgcaaagacaatcataatccgcttataaagcattttattcatatttcaaattgtcagcagacaagaactaaagagagtgatgcaggtacatgaacaatacttgcaatctcttttttcttttgggattcttatggaatttttattaatttaatataatcgcttagtacaactttatatcagtatacgtatacatacagtacaaatagttggcaaggacatcagtaagcgcaggacattagtttgattttaaaaatgaaagatagagaggtgaagtaaattattgagttcaccggcatattcacattgctcgcttttttcgtaacaatgatttttattttctggagaccaaaaggactaaatgaagctatccccgccacatttggcgctttaatggttttattgtgcggaagtgtgtcattggcagacttaggggaaatcggaacaaaagtcacgggtgcatcggttacaatccttgccactatgattatggccattgcactagaaagctttggtttcttttattgggtggctgcaaaactgctccaacaatccaagggttcaggcatcaagcttttttggctaaccaatttgctctgctttctcatgaccattttcctgaataatgatgggagcattttgatcacaactccaatccttttgcttgtactaaaatatttaggtttaaaaaaacatcaaaaagccccatatttattaagcggtgttttaatagccacagcctctagcgcaccgattggcgtaagtaatattgttaatttaatttctctcaaaatcattggaatggatctatatcttcacaccgccatgatgtttgtccctagtatgatgggactcatttttatgacttgtctactgtttatgttcttttataaacgtcttcccaagaacctgccagatataccgggccattttcagtctctgcggcatagaaggtaccatcctcttcattcgccatcagctcctttaccagaacgaaatcaaacaaaaatcatgttgtttgtgcttgcatttgtttttctcgtcagaatgagtctatttgcagcatcatataccggtatttctgttcctctagtcgctgtcatcggatcttttatcctgttgagctggagatggatttatttcaaaacctccccaagagacttgttatataaatcgccttggcacatttttatattcgcttttactatgtatgtcttaatttatggtctgcataatattggattcacagagttacttgtgaattattttgaacctgtggtttctggaagcctcgcccatgcaactttcgcatcaggtatctctacttcagttttttctaatctctttaacaaccatccagcgttaatgatcagtacttttaccttaactgaaatgaccctgaatccttcaacaacaaaaatcatctacttggccaatattatcggcagtgatatcggttcattattattacctatgggaaccttagcaacgcttatttggatgcatatattaaaacagtatgatgaaagtatttcatggggcgaatatataaaaacgaccattatcatcattccgctgactgttctttttacgttaacatgtttatatttttggatcagttggttatttctttagcacagtatgaaacgaaaaactgccttctgctattcaagagggcagttttgcatacactagggaagatgcattgtctttagatgatttaacttccaaatgattggctctccatttgcgttaataagctcaatgatattattagagacatcctttaatagaccaactttttctggcacctctcccatatcaaatatgaccaattcaccaatattttttttgatctgctcctcaaaattacgcacaagaggaactttggaaggcatgacaggcaattgtgagttgtcaagagtgtacggtgtttgttcagttgaataaggggtaaaccattttaaatgatgcatagatataaaaagtattttaaatacaggtgagaaaaatacaatataatcgtttaaaacatttgtaacatacccatggatcgatcgacccccagttacataaacttcaataaactggcctttgaccttgtttaatgtatttctatatgaaaaagcttgagtttctgcctctatggatggatcttccggattgatcaaaaatggcttctcagtactggtcattattttcgccttgtttatttgatgaagatgcaacaagggaatataaagataattgcagccatcaaaaataacaaaaatatcctgtccgatatctatgagggtgccgacaaaccttgtatctcctgaaatgacaacctcaacatctgtgttaaggaattgattcaaacctttcacgattctcctcctttaactgaaaaagggcatcacttaatctgatgctcctccattatctattaaaatttacgtttccagtgatagtctatcgttctgacaatcgtttcatagctataatcatccttttgtttttctgaacttttgaaggaacttgaataacctggtgatcttgatgattgataatctgatgatcttggtgatcgtttagatgattttgatgattgataatctgaagattttaatgatcgtttagatgattttgaagaactttttgaacgtgacgaacggccagatttggatgattgataatccgaagattttagtgatcgtttagatgattttgaagaactttttgaacgtgacgaacgaccagatttggatgattgataatctgaagattttagtgatcgtttagatgattttgatgagctatatgattttgaagaaatgaacgaattgctgtccttatcattattgtcttcctggctttgttcatttttttgatcctcttttttgtacgacccttttggtcctaagctgatgctttttatgtgaaaaggatagatgcgaagcacctcttgatttttcactatagtataatggccgtcggcattatctacaaggataccctcaatggcttccggacctccacgattaattgaaacccatttatgagtcagactcttaaaaacctcgcttaaatcatcagcttccaaaactccaactggcgtctgctcttctattttcaaatcaggctcgtgtttacttatacttttgatgtgatggatattaaaatacactaccccatcctcatttgtgtttaacgcagcgtaatcatctcccagccagaccaatcttccttttttagattccggacccccttggttaaattgaactgattggtttattaaatgtccgattaagctatgaaaatcatcagcatcgagcatttcctcagtctcaattgtcgtggtgctattattggtatcctcagtaatacttttcacatgctccaactgataataaattatttttttttcagcttgtaaagctatataatctgattttacagctgttaattttccttttttagattccggacctccacgatatacagtaacaattttatctttcattgagtgcaaaaagttataatacgatatttcattatttgaatgatatttcattctcctcttgctcattcaaattcctcctagtcacttatacatagatgataaacatactgcatatatacgtgtcacatttatttgttgaactaattcaatagcctaattgtcgctttttccgcgaatacccattttcacgcattcataaaatacttaaatgatctttgaggtattgtgaacggtttttaatatactcgcagatcacatccggctcacggtcaaaacgctcaacatcattctttttatatgggtccatcaagataaaaggcctaatccgttcatacatcgccatgattttcggttccatatattctattgtaaaaagagattggagcgttttttctaacaggcgcttgtaggacttgcgaaactcggattcatccaatatccgggcggttagtgtattaaatccttgaattcttacataatcggcagccatccgctctccatggatatccctgccccaagtcgcatcataatcccaaggaatcacctcaaataatccggtttccccgcttctgtataatgcgtagttgtggacaaacccgtcatagtttgaggtgaatacaataccggcaagccagcgcaaatacttgtcgacatccacgtgttttgtcacttctgacttaaactgagctttagggaccgtattaattttaaaaatcatatcctgtaaataaaaatcatcctcctcagtccctgttttcttttcatatccaagctccagcgatgttttcgtttccctttctaaatcgctcatcagagaaaagttggcatcatcatccaccgcataaaaaatcgcgccatcagccagcttccttttcgccaaataatattcatctacggattcaagttcaagataaaccccttcattcttcccattcatctttacaaacacaaactctgcctttggagacagtgtccctagctccgagaaaaaatccagagacaatttgtttctcatcaaggaaggatctttatactccgcatttaagtgaatctctcgcgcgccgcggaatgttttcggctgataaaaggaaatatggtatgacttctttttgaagtctctgatatgtgatccccgataagcaatatcaatatccagccttttttgatttaccttcatcacagctggcaccggatcatcgtcccatatatccttttttaattcacgcaagtcttttggatgaacaaacagctgataaagcggtaaattggattgattcttcatccataatcctccttacaaattttaggcttttatttttataagatctcagcggaacacttatacactttttaaaaccgcgcgtactatgagggtagtaaggatcttcatccttaacatatttttaaaaggaggatttcaaattgggccactattcccattctgacatcgaagaagcggtgaaatccgcaaaaaaagaaggtttaaaggattatttataccaagagcctcatggaaaaaaacgcagtcataaaaagtcgcaccgcactcacaaaaaatctcgcagccataaaaaatcatactgctctcacaaaaaatctcgcagtcacaaaaaatcattctgttctcacaaaaaatctcgcagccacaaaaaatcatactgctctcacaagaaatcacgcagccacaaaaaatcgtaccgttctcacaaaaaatctcgcagctataaaaaatcttaccgttcttacaaaaaatctcgcagctataaaaaatcttgccgttcttacaaaaaatcgcgcagctacaaaaagtcatactgttctcacaagaaaaaatctcgcagctataaaaagtcatgccgcacacacaaaaaatcttatcgttcccataagaaatactacaaaaaaccgtaccaccactgcgacgactacaaaagacacgatgattatgacagcaaaaaagaatactggaaagacggcaattgctgggtagtcaaaaagaaatacaaataatctaagttttcattgtttcaataggctgccggcggaggtacggaagcctatttttttatttgccctgtattagatatatgtcatgacataacatatgcaacccgcatcatttggtttcctttaaaccatttcgttataatcaaggtatcctaacgataaaggcggttgttgctatgtacatatttcaagctgatcagcttagtgccaaagacacatacaagctattgtcaggtaccgttattccccgccccattgcatttgtgacaacactttcttcaggaggagcggtcaatgccgcgcctttcagtttttataacgtcgtcagctcagatcctccgcttctcagtatttctgttaacaggacggaaggacgccaaaaagatacagcgcgaaacgcagtggagaacggagaatttgtcgttcatgtcagtgatgaagccatcattgaagatatcaatgaaacagctgcaagcttaaggccggatgaaagcgagcttacacgcacctcgcttcatcctgttgaaagcaaagctgtttcagttcccggcattaaggaagcccgcgttcgctttgagtgcaaattagagcggcatattacctttgacaatgatcaaggcatcactacagcagatctgctcatcggaagagttgtctgcttccacctagatgaaaaggtgtatgatgcagaaaagggatatattttaacggatgaattaaagcctgcctcacgattggcgggaaatcactatgccaagctgggggaagaattcacactgattcgtcccagctgaagagaaggactatttaaatagaagaaactagtcaaaaagaccttatgattacaaaatatcgcctgtaaataactgaaaaaatatcaaaaaaaagaacacccagagcaagctcggggtgttcttttatgaaacgtttttcctttttcttcgtataaaggtagattaggaggaattggaatgacaaacttttggattttaatgctgatcgctattaccatcagtctcgcctctcaattttttataaagaaaaaatacggtattgataaatccggctggcgatataagcatgtcagcaatacacacaaatggatcgaaatcactttacttattttgtttgtgttttcactctccttttttccagttgaatatttgcttcttttattttttattgtgattgactcaatacgaatttttatggagtggcattatagacctgaagataaacagtatatgtaccacattgtagaggtctcacttatgtttatgcttttgatttatatttgtaccctatagttatttaaatccccacagccgctccgtctccccgaggatcggctccgccttggagaaagccttcttcatcaactttgattgcagccgcttgtcccatcagcggatcatagtcaccgacaacctccacgagatgcccgctgtctttcagtttttggattgttttgtctgtgaatctgccctcgactctgagaccttcgtattcctctccccacgttctgccccatacccagcgcggttcgctgattgcttgctgtggatgcattccgtagtccagcattcgggtaatgatggccgtctgagtctgcggctggccttcgccgccttgtgtgccgtacagaatttttggctttccgcttttacagaccatagccggcatcaacgtatggaaggtgcgctttctcggttcaagcgtgttgacatgattttcatccagtgagaaaaatgatccgcggttttgcagtaatatgcctgtatcaccggctgtgactgccgagccaaattcaaagtacaggctttgaatgaatgacactgcgttgccatccgcatcaattacggccgcatatgccgtatcacttcccaccggcctgctttctgccggttctgccagaatgccgatttctcccgccaatcgtttcgcataatttttatccaaaagcctttcaagcggaatgtcagcaaacgcagggtcagtcaaaaaggcattccgatctacaaaactctttttcagcgcctccacaagcacatgataatactcaaatgaaccgtgctcgatttgggtgaaatcatagttttccaaaatgttcagtgttaataaaccggtaaatccctgagaattcggcggcgcctgatacacactgtatcctcgataatcacttgatacaggctctgcccactcaccccgatgcgctttaaaatcatcgattgtcatgtaactgccgttattctgtaaatgtgagacaattcgctgagcgagatctccttcataaaatgcgcttcttcctttttcagtaatcaagttcagactgtctgcaagctctttttgcacaaaccgctctcccgggacaggcgctttgccccttctcgtgaagatgtcagccgtgtaaggcgtggaagccagcagttcaatattcttttctgtgtgacgacactgatcagctgatacaggaaacccattttgggcataatcgcgtgcgggctccaatacatctgcaagagacagacgcccgtactccttcaggaccgcatcccagctatcaaccattcccggcacggtaatggcactgtcaattccccgcagcggaatcgcgctttttcccttatatacatctctcgttacgttttttcctgaacggccgctgccattgtagacttttactgcctttgtttcctggtgaaaggtcagccaaaaggaatccccgccaagtccggtcatatgcgggtacacaaccgcaagacaagcactcaccgcaacagcggcgtcaaacgcgttgccttccttatccagtatgcggtttccggcttgagaagcgaggtaatgcggactgacgaccatttgctttgtaccgatgacagatctgttcatcacaagtccccttttttaagaaattttcttcagtatagggagcctgatttttcacatctactgatccggcagaaaaactgacgaactttcttcttttcgcaaataacaagatattttcgcattcatttcgaaaacaaatgaaaaattattatttcgatacgtaacttttatgataaaatgattgctaaaaggctacgaaagcaggtggagcaattgagtcatgaatatcaaatccccaaccttgtacttgatgagactgataaacaaattctcacgattttgcatgaagaaggcagaatttcttatacggatcttggcaaaagagtcgatttgtcacgggtcgccgtccaggcccgtatcaaccaattaattgaagccggtgttattgaaaaattcaccgctgtcatcaatcccgctaaaatcggcattcatgtttccgtgtttttcaatgtcgaggtagaaccgcaatttttagaagaggtcgctcttaagcttgaggaagagcctgcggtcaccagcctttatcacatgacaggcccgagcaagctgcatatgcatgggatctttgccaacgatcaagaaatggaagaattcttaacaaaacggctgtatccattgcgaggcgtcgtcagtgttgattgccagatgctgatcaaacgatacaaaagccgtatgggaatgaagctgtaaaggagagaaacgaatgaaaaaccatccttatcgggatatgacggccgcaatggttcgcaccggcatattagggttcggcggcggaccttccgtgattccgctgatccgccatgaagcggtcaataaatataaatggattgacgatgatgaattcggagaaatattagcaatcgctaatgcgcttcccggaccgattgccaccaaaatggctgcttatctgggctttaagctaaaaggcacattaggtgcagttgtggcgaccctcgcccacattctgcctacatgtcttgcgatggtgggcttgtttgcggctgtaaatgtgttaagccattcagcaattgttgcaggtatgatcggtgccgtcacgccggtaattgcggtaatgctcggaatcatggcgtacgagtttggccaaaaagcgcttaaaggtttcggctgggttaccggcatcctgttttttatcatcgcttttatcggcctgcaaactttacagattaatcccggcctggtcattatcattttcttagcgtacggggcgtttcattttaaactgaaagacaaaatcacaaataaacattcaaaagataaaggaatgtcagcctcatgatatcgatctatttatttatggcgttttttatcgcaaacctactgggatatggcggcggacctgcgtctatcccgctaatgtttgaagaagttgtaaacagatacagctggctctcaaacgatcaattctcaaacatgctcgcacttgcgaacgctttgccgggcccgatcgccacgaaaatcgctgcgtatgtcggctacagcgcaggcgggtggcccggcttcctaattgccctgatcgcaaccgtcgtaccgtcggcgctcgcattgatcgtcctgctgcgcatcatccagcgcttccgccaatcacctgtcatcaaaggcatgacgctgtccgtccagcctgtcatcgcggtcatgatgctcattcttacctggcaaatcggcgcagacggcatcaaagcgatcggctggatccaatcgatcgtgattgcgggaatttcgctccttgccatgacaaaattcaaaatgcatccggcatttttgattatcgcggcgtttttatatgggggccttgtgatccctcatttatagaaaaaagcacctggacaggtgcttttttattttggcccagaaatgccgtttgatatgacagctgtttcttctcctgcgtcactcttgatgatgtgcttgacttgcagcgtggttcctgccattctcacagattgcttcaactcggacgaattggtttcaacttgtatccaaacaggaggctggaccttccaaaataaatagagtgcaagaatcagcaagccagcaatgaccgacagcaaaaacttcatatcgcatcgcttcttttcagtaagcggcccgcagcggacagcgcctgatgatcacgaagaatatcgcctggacgattgccttctcccagcacatagcctttaaaggacattcccataaaatgaaaaatatgttcgaattgctgaatcagcggcagcccttttatttttggattgtctccgcccactgctattacatatgcctgtttcactgacatttgctgtttaaaatcaggaaatctcggatctctcaacgtctgtgaccagcgatcaataaacagctttaatgtccctgacatgccaaaccaataaattggggtggcgaatacaagaatatggcactgcaatatccgttcaatgatagaatcgtagtcatcttgaacaggacgaaagccgccttgggcgtgacgcagatcttcaattggctgaattcgatatttctgcaaataaatgtgctccgcatcgaatccttgaacagccttctccgcaagaacatccgtatttccgccagaccgagttccgccgttaataaccgcaattttcatgatgcatctgctcctttgtttacgaatgattttcttcatcttataatggattcatctatcaatacagatgattatttcgattaatccaatcgctaaaaccgatttagaaaggaagagaacaagtggaattgaagcagctgatcacctttattacggcggcagaacatgtaaacttcaccctaaccgccaaaatgcttaattatgcacaatcaagcgttacctctcagatcaaatcacttgaagaagaaattgggacgcctttatttgaacggctcggcaagcggcttatcttgacagaagcaggaaaaacgttcaaatcttatgcacagaagatcattgcgttaacagaagaagcgaaaatggccgcaaatcaagtaagagaaacaaccggaaccttaaaaatcggggcgacagaaagccagtgcacataccgcctgccccctatcataaaagaatttaaacaggcttttccccaagtaaagctcatattcaaaccatatatctccaatgaacaagcgaaagaacagctcttacagggccagcttgatatcaccttcatcttggatgtaaaccggatggaagacgcactgcacgttgaatctttgattcaggatgagatcaaaatggtggctgctaatgaccatccttttcctgcggatttaccagtaacattgaaggatcttcaaaacgaaactcttctgctgacagaggacggctgctcgtaccgcacgctctttgagaacaatttgcatgactccggtgtctatcctaacaaattggaattcgtcagcatagaagccatcaaacaatgcgtgatggccggacttgggattggaatcttgcctgaaatgacagtaaaagatgatattgcagcaggccggatgaaagaactcaattggcagagcgattgccccgttttcactcaattagcatggcataaggacaaatggatgtctgcgccattaaaggcttttatcgatttgacacggaaaacattcaaataaaacctctccacaaggacgacaaggtttttgagaccaggaaagcacacacatacaaaaaaacacttgatgacttagagccccaagtgttacatgtgatttttctgataaaacgttcgcaaaacatgcgtttcaaggtcagccaggcggacagggattggcaatctgctttcttgattgatcaagctcatcgtgatctgatagctgctgtctaaatcaatataattaccgcaagacaagaaaataggcttcacgtccccccgcgttcgcagcgcccggccatatacctcgccgtcaatgagaatatcggtgtatgcaccgacttcattttcaggcatcacgaaatcatagcctttgattttgagataggttttcgcaatcccaatcgtcggcttgcccagaaaaaaagccgcatgggtggcaacgcccatatgattgtaatgcagatatccgttgccatcaaacaagaagacatccggctccgtctccagctttttcgccgcctcgatgatcaaaggcagctcgcgaaacgcaagaaaaccggaaacatacggcacgctgattctccccatgctgtgcactttttcaatgacttcttttgtatcagcgtcaatcacgataatactgcacactccgtatggttctccgttctgctcccaataggcgagatcgacgcctgcgcaggtgttgatggagttgggatggatcgtgtgggataggttgatacgatttctaagggattgttgtgtttgaacaaaatccgattcatcttttagatgaaaatcgtgtatttgatgtatttccattttacttgtttccctctcttcgcgctcaattgtcctgcatgtcgattctagcaatgacaccaaattatatcattgaaaaaagcagatagtataatctgcttttttattactattcatttttcatttctttcataaaaatataatccaattgtttaattaattctttaagttcagtacacataatatcctctaaaggattttcccaatcttcgttttttatcagttcaatcccatagcttccggctggatcaccttctgggtaccaccctacgtcaagcagcaaattttttgtcttatgagaaatctgcaggagatcttgattaaagtcaaataaccaagcatcgtcatttgcctctagcgtcttaggatcagtatcctttaatgtaatataatcaacagtccaaccagccggtatctttagccttaaaaaattgggaatctgttggcttagtggctgtaaaccctctaaaaccccgcttcccacactccagatttgatattctaactcttctaataattgttctatctcattaaaagactcatcttcataaatcttatctgtttttaagccagctactttgatatggtattgattattttcataacttaccttaataaaggccttacgtttttcattttgtagtattagtaattcacatttttcttgcattcttttttctgaacataaattgttcagtactacagaccagccattacagatttttaatggctgcagttgagaaatatggtctctttccatcccgcttctccttgcactccatattgttatactatctataaaaaagcatgccgatgacaacacggcatgtttttaactatagcaattctaatacatcagagtaaacaaggcatctcctaatgttaatctcctgttgaaaggctgtatatgcggcaattcactccactcatacacagtatcgtagtaatcatacaaataactgagttcaataaaccctttctcttgcattattttattaatatagttcgttccctgaatgaattctaaagattcagcggtgcctacaatatcataaacgccatcgattaaatcgtgtcttagggaataactataatctaatacataaacaggaaccaatttagatactttcatattgatttgctgttctaaatgaaaaccattttccccagaaagatcttgcaaatggatatcaatttctcctgaaggattgtttaaatctctaacttcaatttttttcaaaccttttatttgattaaattcatcaggtacttttattttctctgcgcatttgttcttgtaccattcgcctaattccctattcacaaatagacgataaagcaactcaccaatttcaggatattcattaataaacctgattccatgttccataaatagtaaccattccatcctttaatcaagaaaatctaaacttcattccaccaagtagttgttacttgttttaaatgatattcaatatataaaatcacttttttatagtcatctgatgaaaattctttaataggatcttcccaatcattatctttgactagtaaaaccagataattaccttcaggagaaatgtcaggaacccagcctaaatcaagcgttattgaggattgttcatgataaagctgcaacaaactgtctgtgaacaaaaaccaggaatcatcattcggttctaatgttcttggatctatttcaacaaaatgattataatttactttccaaccttgtgttattcttaagggatgtatattagcttttggaacatctaatttaacatgttttctcatttatataacctctttagagagccgttattcttaaagtctgtttttagataacttgtcaaccaactatttgagtgggagacctgaaaggtgaaaatgtagattatgaataatatttacttagctgtacgaacttcattttacaaggctgccccttgcatctatattcatcttactaattatcttatagatcagtttcaatgcaaaaattttaagtttaaaaaacctcgagaggcaagcgccaatcgagggaaggttagtttttttctacttacttgttaaaggattaaaactgatattcttccagaaaaacgttatgagaacattagctgcatctcatattatctttcctctctgcacaagtgattatattcaccaaatttagggaaatcatcccagttgctcttaaggttgtcgctagtctcacgctcttcgaccgaaccggtcttgaaatctgtcttctccattgctatatgaccatcttcgcgaaagcctaaaatcaaactgctaacttcattatcagttgcatcatcatattcccaatacattgctgttcttaagaagattttaccatcacttataacttcaaaatcataattcagatacttacgagtcaagtcatcataaaaacccactgaaacccatttatttgttacatttacaacatatttaggtttttcgccttcggttaataccgcagtatatggttcatgtttttggtgatgtaagtatgcggtacaatcatcaagaatattccaaggctgtttttttatgtccgaccattcatcacaataataaactttcatagtcaattatacaccttcccatttatatccctaataataatcctattttttgttgcttcatcaagaattttttgtggaatagctttattttgaacaggtacttctaatatcaattcacctttcagtcatccgcctttaagagcttttggattaaaaggaccatttgatattttagaccctgaagaatattttttagtaatctcgttcaagtaactcagtgctgtcttttcttgaacgtcactaagttgagtatacttcctggaaactatctccttatttggagaatatgaatcaactacgtactttttgccgcctgcttcttttgcttctagctctacttcattataagggtaacgggggcgattttccttattgaaattatttcctgcttcccaccgttctttaagccaagacggtaatggattcttattagatgacttccccgtacccttaatacctttaccactactaaccatcttcacaatcccaagatccttaacagccgtcttttccacatcgacacgtactgtcgggattccgaatgtaaagccatccggagttacagggcgttctgcgtacacgtggacgtttgttgggactttgaattgttttactttctctagtgttttgtttgctttttggacttttgaatgggttgcaagcgggatgcctttatcaatatgtttcgccagtgcaccggctccaaccaaactcagcacagcttccagcgccccctgcttccgcttctcctcagacactttgtttccaaacatatcccgtcccgtgacggcttctgagaatccgtttgacgcaacaaggccgtatgcacccatttctgtcattttgagaatgtctaaggatttgcctgttttgtaggcgtctaaagcgtgttcagccgcgatagcagcttttccggttttgtagatggcttttccgcctttgaaggcgcggcctgcccagccgacgactggtataaatcccacggctgccatggtgccgactgtgacgcgttcaaagcctatacttatttacgctatataaaacagtggacaacaaactaataaaaaaaccttgaaaggcttcagtgccaatcaaggtagaaaatcaaaccaactcgaagcgtttatttgtttttaataatgccttaagattttttaacaatactattaattccttcaaatataatatctctcataacttcattattactgttataatttctttcatttcttattttattaaaaacctgctttataaccccatcaatcattattgttaatccttctatatcttcttcactaccctcctttttaaaactttcatttattattaccaagctatcatcttttgacattttattttctcctttactctctttctttctcattaaaaactttgtctatataatttacttcatcaaaaatccagtatctatcctcttcaggaatataactagtaaagtcttcccgaacccctgtccaattattaggaacataattttcaaaaggtaataactcaggatacagcgaaagaagcattttttgattaaagtctatatataatgatggccttaattctagaatagtactttcataatcctgatgttcaactaacttctttaattctgaagacgggataatatagtcagtatattcttttaaataaagacgataattatcttcatttacaactgaaatgttatttcttagagaaagagcaaagtccatatcaaaactaaacccgtttttttcataggcttctttatatttcatgatatctagtatccaaacatctctttctgttagataccatgagaattgagaagaagtctttaccccgactattatattttgggcatactccggttttaataacaacgaaaacaccactttctcattctatttttttggctgaatgcccatattcctctaaccactctatccatggttccgccggaagttcataactaactcccggtgtcgtaggatcaacaagctttggagcagttctcccctggttacgagggtttttagtatatccatactgatcaattactgtctccttgattaaatcatcaatctctttaggtaccttaaattctacaatttctccgcctggtcttgctacatctcgataatatttagcgtgttctaaattgtaagcacttatgtttaaatcagcatttttaataggaatagcaatgcttccatcactatttactttaattctatactgacttgttttatttcccgctcctcctccttgaactctgtaataacttactgattgttcgacaggatcgacagattttttacttgattgtaacttatcattatttactttcttcgtatataattgtttcttctctggctttaagtcaaatgtatggccagtcgaagtaacaatctgttctttatttatatgaccactttgcttaattttagaaaaagaataactcttatcaagatttcttcccatcgatagcgtattgtcaaccgacttcgccaatgcaccagcaccaaccaaactcaatgccgcttccagcgcacccgttttccgcttctcttcagacactttgtttccaaacatatcccgtcccgtgacggcttctgagaatccgtttgacgcaacaaggccgtatgcgcccatttctgtcattttgagaatgtctaaggatttgcctgttttgtaggcatctaaagcgtgttcagccgcgatagcagcttttccggttttgtagatggcttttccgcctttgaaggcgcggcctgcccagccgacgactggtataaatccggctgcggccatagctcctgctgtcacacgttctgcggtggagagtttttctccggtaaccggatcaacgccttcagttgctcttttataatcataatagccagtgacttctccagtaaagttgcaaactccatcccatgttttttcgtaccatggtttgtttgcttcttcctcggctttttcctggagacgtcttgcttctgcttgctgggcttttgcatcaatataggttgttccttgattttctacttcaatgacgcttttgtagacttcattgctgtggaaggcttttttgtcatagtacataggggatgcgctcttcccattgctggtggcctgcatgagaacagaatatttggtgagcactgcgttgtccagagattctaaattttgatattcagtggtcagggattcatcaagcttatcgacagctgtgatcgtgtcacgtctgactttttgggcatcgcccatcttatctgcatactcgtcaagcgtgtacatgtcgaggtcaataatatcgctgatgcctgacaaaatagaatcgatttcttctttatgagcggagactatctctgaggctttcaggtctccattgggcagctcatgatccaaaaatgaagtttccacatatgaatcattcagttcttgatctttaatatcgcctgaaatgccgtttaaaaatgcaatttgagcagagacaagcgtcagccagctgtcgacgatttccgcctgtccctgaaagaaatctttaatattgtccgcgccttttcctttaaaattatcgcctaaatctgcaactccctgaaacgcttttttcagcgtattcagctgctcttcaagcgtctcatattgcttttttctgctcttcgcttcttcgattaaagattttgattcaaatactttactcatcgcactgccctttctgttctattttaccgctatcgcctcgtcctgctctttaagtgaatctacgttatcctttgtatcctcgatatttttctgtaccgcttttttgtaatctccgagcatggttttgatgttctcctcacgctcatgatattttttcgtataatcgagtttattttttccattggaccccgcggcgccgattgatacgtcagcaagcgcatctttgacagactctaatgttttgattacagcatcgtatttcaatttaatttctgacataaaaaagatcaccacaatttaatagatttaatttgattaacagcatcctccaagaattcttcacccttagcaagagtatgaccagcaaaattcgctagctttaattctttgtcatagagaaatttcatagattccaactgaataatctccatctgaatcgaagccatatactcgttatatttatcattcacaatcttagatgcttccgatttcgcctcttctcttcccttgtcgaaatcatcggcttttgttcccgtccaatgcttgcccaattctggttttacaatttctttgatttcagtgattgcctcttcttgcagtgtgtctatgtccttttttgcttttttcagcttttcgatcttgtcttccacgtcggaaatttttccgttgagcgaacttttgatatccgccagcatactttcataacccatctgaatcacctcttaatactcaaaaagtcgtatggaggggctgatgaagatagacttttccatactttatttccatatattatattttaaaatagccagaaggcggcttaaatagggtaaatggcttaatttaggcatataacgctcttgaaatgtaggtatttgatcttgtttttgttcgttatacagctaatgaaaacgttttttaaaatgaaatcacctaaagtcatagttataaaggcacttgaaagaggcagatgttgttgatctgcctcttacggcgctgagcttattgttcatgtttatgttcttcatcaggtcggccacgtctgattttgtctttggcttctattattccccgcttctgaccctttggatcaaaagcttgtattagctgcagtcccagttgtacagaacgtttgaaaagtcttttttccttagatcgtcaggtgtgatgaaaaaattggcgatgccgacgtctccccacattgaatcgatatcatcgtctgaatcaatttgtaaaagcatgatggtgtgttctttatatgcgtattcccgtggatcatgctgggtaaaagaagcgtatccgccgattttatggccaaatccgttttcagccagttcattataaatgtcttcttcatcctcgccgaactgaccaaagaactccattgtttccatgcccgtatactgctcaaattgaaaatctgtaggcagcacccattccgaagatttcacaggctcgactgccgcttctgataaaatcggaaaatcacattcgcctgtgccaataaatgaaaaatcagaaacaaggtcgtcttcgttttctatgatattttcaaaatagatcactctgaaattcttttgttcacatcgatcgtcaaaattcaatccatagacgtcatcatgaagagaaatgtagaactgcaggatacctgaagaaggatagccgtcaagctggggaatgtgcgagaaattaatctgcgccagaagcttcatcggctgtccatattcgtcagtcggatatgtttcatgcttggggaaatagggatcaccggcaattttgctgtcatatcgtcctgttttcccttttctcacattcagtttcacgtattctttcgctgatttctccagcaagtcgcggtacggtctcattttttcgggtagatgattcatcagattctctccttttccggcatctccaaggttttattttctggttttcttcgtttcttctaatgtttttcaaacgattgtttaaagaagccctacttctgtataattttccaaacaatagttaaatagtagcaaatgtattcagcaccccgcaatagatgaaaaaaagactggtgcgcaaccagcctttctttttcaactattgaattgcacctgacggaacaaccgccttccgtccgacagaataatactccactcctgcagccaaagcctcatccaatgtgtagcagtttctgccgtcaaatatgagcggcgtttccatcaaatcctgataagccgctaacgggaattgtttaatgtcagcccagtcggttaaaatcatgacggcgtcagaccctttgacagcttcctcgatcgtctctttatattcaacagcttgcgggagaacatgctttgcatggctaactgcaatgggatcgtaggctctgatacgggcgtcgagcgcagcgagacggtctgcaataacaattgacggcgcttctctcatatcgtcggtattcggtttaaatgacaggcctaaaagggcaatcgtttttcccgtcaccccgccgagcctgttcagcgctttatcaaccagcatcgcctgctgattgttgttgactttgataaccgatttcagcagttcaaaatcatgctcgacattgccggcaatttgcacgagggcgtttgtgtcctttggaaaacaagagccgccgtagcctatgcccgcttttaaaaactggctcccgatccgcttatcctgtcccatcccgtatgcgactgcttcaatatcggcgccgaccttttcacatatattcgaaatttcgtttataaaactgatcttagtggccagaaaagcatttgaggcatatttgatcatctcggcgcttctgatatccgtttggtatatcgggatttgaaacggacggaagagctcctccagcgtatttgctgttttctcatcggccgtcccgatcacgatcctgtcaccatgaaaggtatcatagatcgccgacccctcacgcaaaaattccggattggatgcaaccgaaatactgacaggctccgctagatgttcagtgatcagtccattaatcaaatcgtttgtcccaacgggcactgtgcttttcgttaccacgactgtatctcgtttgacatgctttgcgatgcgtttggccgcatctgtaatttgctccagattggcgtgcccgtcgcttttctgcggtgtgccgaccgctataaaaatgatgtctgcctgtgccaagcctttctcatagctcgtttcaaagttcagccgtccatcagctgtattttttctcatcagctcttcaagacctggttcaaatatgggggaaatgccctttctcatttcatcaatcttgtgagcgtcaatatcaatgcaggttacatgatgtccaatctcagaaagagaaacacctgtcacaagaccgacatagcctgttccgatgactgttatattcattgtttccctccaacagttaaattgctgctttgcagcttccgtaatatcgtatgagaacatcctatcatgaatgcgaatgatctcccgcatagcctgtcgggtacagcctgtacagatttctgaaatgtgattcaatcatacaatacactattatatcgctctcaaaaagaaagtggtgaaatgagaatcggctgttaaaaaagaccaaacaattttcttcttttgaccggttgcggaggctgtctgaagatggtctgattccgcaggagaagctctgcattttccgtcagcatataaggaagttccgagccgaattctttctctagaacataaagggcctcttgagtgtgaaaatttctcgttttcacattatgggcatctgaggctacgaaatggatcaaattggcttcaaccagccggagagaaaatgctttcagctgcttgccgaaggtccccgcaagacttcctgaagtaatctgagatgctgctcctttttccacaagatgatacagcaaggacgggttttcgcgaatttccctgttgcgttcaggatgggcgataaccggaatatatcctttcagctgcaaatcataaaaaagctgctccgcatatcggggaacgtgatcaaacggaaactcaatcaagatgtgttttgtatcattcagcgaaagcagctgctgtttggcaaggtcttgttccacctcgccgtagattctgatttcctgtcccggaagcacatgtaaaggaatgtcttctttgattaaacgtttgtttaactgatctgctgcttctctgactgcagctggctcgtttttatacacaccgttgttatgatgaggtgtcgcaatgatcgtccggattccctgacgaacagcggctcttgccatttctatgctgtcggccgaatcacctgccccgtcatccattgcgggaagaatgtgacagtgaatatcgatcatgtcctagcccccttttttcgcaaaaataaataacgggcacgatgcacgttatttattttgcatgaaattgtccttgtttccgtaatatccgtattcagagtgcttcgaaagctttttgccgttcataatcgccccaagaagcttgcttttgcacgtttcaagcgcctctttcgcttttgcggcttgttctttttctgttttcccgcttgaaataaccagaacagaaccgtctgccacgttgcctaaaatctgtgcatctgctacggcaagaataggcggcgtatcaaaaatgaccatatcatatgccgcacacgcttcgtatgcaagctccttcatccacttcgaggagagaagctcggccgggtttggcgggatcgggccgctcgtcagcacgtcaagatgtttttcattcgatgcctgtacagcctgctccatagagcttttctttaataaaacagatgttaagccaaccgtattttcaagaaaaaaggccgtatgtactgttggttttcgcaaatcagcatcaatcaggagcactttttttccctgctgggcgaatacgacagccaggttggcggccgttgttgattttccttctccgggacaagccgatgtgatcatcactgatttcatctggcggtccactgaagcaaattctatattcgtgcgaatcgtccgatattgttcagagttcaaggatttcggctctgtcattgcaatgacatttctccgcatccgcgagtctctgctttttctaagcgccaaaatgtccactccccgttttttcagattggaaaccctgtaaggtctttgctgttttctgctcattcgcaatggtggaaactgtccctaaaacaggtatgtccagcaaggattcgagctgctcttccgatttgatcgtattatccaaatgctcgagcaggaaggccagtccgatgcttcccgccaatccggctgcaaacgcgatggcaatgtttagtagcggctttggcgatacaggggacggatgttctgaaacctcggcttttgacagaatgctgacattgtcaacattcataatggatgtgattttgtcttgaaaaacagatgctatagtattggcaatatgagccgctgtttccgcgttttcatccctgactgatatgttgaccacttgggagtcctgttcgctggatacggtaattttgtcattcagttcttgggatgtcatcgacaggcccatttctttaatgacttcatctaagatggcaggacttttaatgatgacattgtacgtattgattaactgaagattggtttggacatcgttaaattgaacttcttttcgttcatttttcgattggttgaccagaatctgagttgaattttcatagatgggtgtaagtgcgaagaaactaatgagtccgccggcagcagtggcagctgcggttacaatcataatcaaaagtatgcgttttgttaacgttgataatatctcttttaagcttgtagattctcccatgatacctccaaatctcttataacatccttttccatctacgattatacaacgttgaaaccgcatttctccagcttttcacgtgacataattcgacatttttttacaaaacgaaatgttactcttttttatgtaagcgctatatttactgtgttgacagcgctgtctcattttctcttattcgtgcagtcacgtaacctcgcataaaaaaatcccgcaaaaggcgtgcgggatttttatgttgcatatccatttttaatatgagaaatcaaattttcaagcatttccttcgtcgtcatctcagatgactgctcaccaatttcatgtgcatgcatcaaaattttcagaaattcttcttgattcaatttcttttcactcatcttttttttcctttcagcttccattaagttgaaaacacgattattatatgatgctggttatcaatttgcaatctctaatacatcattcgacacatcccattttttatgtccttttttaggaaaaactttttaaggccgatgtgttgcgatataatagagaaattggatctttttattacgtgactcggttaggagcgataatcatgcttcagaatatgatttccaaagacgatgtgctggcatctgctgaacagttaaaagaacttcttccttacaatgaggaaaatgttcagctgatcaaaaaagcccttattttatatcggcaggattcagtctatcgtttacaagcagtgagtccgacggaagttacggcttacgtgcaggatgttgtgcctgtgcgggtcacattgaacttgtttgtcatagtcaaaagcggctgttcatgtccgtccggaagaatctgccgccatatgctggctgtgtttttatatgtatatgcaatgttcgagcgagtgggtacttttacagagcattggctggagagggaaaagcttgaggaaagcaaagagctcgtccgccgccagtttcaggaaaaggtgctgcctaatgaagaatcgctttcaagctggcttgctttttttgattcagagttttctctctggcaggcacgtacgccagaaggcagccaaaacatgcagggcctctattacggctacctgtccgcattaaaaaaacatgcgccgaacaagccggagctgaaaagcctgtatcagattcattccgcgattgcggtttggcttcgcatgttcacattgattgaagcgggcaagctgaaccccgaacaagatttttattccctcaatccgtacgttgaacagctgatggatacaatctacagctctattgacaaattaaaaacgtacgcgctgtcttttgcgcttgatccgtttttggataaaacaccggatgttatccgacctttgctgttgaaagaagaaattttccaatatgaacgcatccgcgtcttcggtgaaatttggagtgcgctgttgtcgcggccaaaatgggtggcacgcgaacaggagatattgaaaaaagaagctggacggcgtttttctcccgaattgcaattcgggcgcctgcatttggaattcctgcaaaagaatgatgacgttatttttgcggaagcggatcaattcccgccggaagcgctcccttatacgttccaatggctgagtgaaatgactgccaagaaggactggaaacggcttaaaacatggtaccagcaaattgagccaattgcgatgggttatacgaagctggataagccgtttaaagagattcgcgatgtgatcggcgagctgttccttctgttgaatgcctatgtgcagcaaaccaatgatcaagcgctgtttgagcgctttgccgcgggctgtctgccgtatacgttcacagaatacagccatcatttatatgaaaaaaaacgctatgccgagtggattgaaattcatagccttgtcggcttttccatcaatgaaatggataaaatgatgctcaaggaaattgcagcgagcgaccctgaggcgcttataccggcttaccatagagaagtggcttttttcattgatcagaagaaccgcagctcgtacaaggaagccgcccggtatttgaaaaaattgcgcaccctgtacaaaaaagcgaaaaagcagaaggtgtgggagcggtatattcagctgctgagctcgcattacaagcgcctgcgtgcgcttcaagaagaactgcagaaaggaaagttgattgatggcgagtcttaaagaaattctcatccacgtcgaacaaatggaagatgggtcatttacgctctcagcctttgatgaaaatgagcagcctcttccctacagccatatgaaaaagcatttgttccaatggcatgaatcctcattttacggaacctttctagaggatgtcagcttcatcgggacgactgctgtcctgctatcgccatggatgactgtagagcttctcggcaaaaactcgttcaactcattcagctccgtgcagcttacagaagaaacggagccgctgatcgaggcggcatcgaccatctatgaatttatcgcggacggcgattttctgcctgactatgacgcatggacaaacggtgtttttcgctggaaagaccgcgataatatactggaaggctttactgcggaatggttttccgctgccgtacaggattacatccagtacgacgatgacctgcgggagaaatgggaacatatcaaggaaaaatcgcctgcggttacgacattccgcggccattttcttgatgaagaggattttctggaaggcattggctggattgacgatcaatctccatttactgtcggcttgcgcttaaatgaaccggactttgacggagacgaatggaagatcgagatgtttttacgcgataaaaagagcggcgctgtagaattctttgacggactgaagagcctcaaaaaatcgtggcaggcgtacagcgataaaatcgcgcgtgagcaggaccgctttcacagaacggttccgtggctgtcgtttgattccgggacaacgctgatctcggaggaagaagcctggatcttcctgtcagaagcaagtgagacgcttgtcgatatgggggtagaaatcctcctgccgtcctggtggcagattgtcagagacagcaacatgatgctgaaagcaaaggtgtcgtcctccccgcgcggcgagtcatttgtcggcatgaatgcactgcttgatttcaactggcggttcgcgacaaatggaattgaactgactgaggctgaatttaatgagcttgtcgccagcaacaggcgccttgttaatatccgcgggcaatgggttaaaatcgatccgcagtttatcaaacagatgaaacgcctgatggaaaaagcagaatcagagggactccacatgtctgatattctggcgcgcgagctaatggatcagcaggatggcggacttgaggattcggacctgattgatacatctgcttttgccggcattcagtttgatctgtctaaacagctcaggtcactgattcgaaagctcactgccgcggaaaacctgccggagcacgaagtcagtccttctttcaaaggaacgctccgcccttatcagaaatacggcatgaactggctgctgtttctgcgggaaagcggttttggcgcctgtctagctgacgatatggggcttgggaaaacgattcaaatgatcgcctatttccttcacgtgaaggaaagcggccggcaaaaaacgcctcatttgattattgcgccgacatccgtacttggcaactggcagcgggagcttcaaacctttgcccctgatctgtctgtcgcgctccattatgggccgcgccggccaaagggtgatgatttcgccgcgcattatgaaaacgcagacgtggtgctcacttcatacggtctgtcacatgccgatactgaagagctttcttctgtgacatggaacacgatctgccttgatgaagcgcaaaatattaaaaacgcgcatacgaagcaatcacgcgcaatcaggaagctgaagggtcttcatcatatcgcgctgagcggcacgccgatggaaaaccgcctgactgagctgtggtccatttttgacttcatgaataaaggctacctcggcagtttgaccggcttccataaacgctatgtgctgccgatcgaaaaagaccgggacgaaaagagaatcggacagcttcagcaattaatccggccattccttctccgccggacgaaacgggatgaagaggtcgcgcttaatcttcctgagaagctggaagaaaaagaatttatcccgctgtcagccgagcaggcatccctttatgagcagctcgtcaaagacacttttgaccatatgacgtccctgaccggcatgcagcgaaaagcgctgatcctcagcatgcttggacggctcaagcaaatatgcgatcatcccgcgctttacttaaaggaagagcaaaccgagctgctggccggcagatcagtcaagctcgaaaaattgctggaactgatgacagcgatccgcgcccaaaacgaaagctgcctgattttcacgcaatacattcagatggggaacatgatgaagcggctgcttgaaaaaacgttcggggaacctgtgcaatttttaaatgggagtctctccaagcaagagcgggatacactcgttgagaaatttcaaaggaaagaatatccgacactgattctctcactcaaagctggaggcaccggacttaatttgaccgccgccaatcacgtcatccattatgacagatggtggaacccggcggttgaaaatcaagcgactgaccgtgcataccgcataggccaggagcgctttgtccacgttcataaaatgattacgacgggaacaatcgaagaaaaaattgatgtcatgcttgaatccaagcaaaccctgaacgatcaaattatccaaagtgaaaactggattaccgagctttccacacaggagcttgaagaactgtttacattaagcgctacagcgcaatgatcatgactaaaaaagctggctctgatagagccagcttttttccgttcatagccgtcacgccgaatctccaaaaaatccgttacgccggttatatcaacaggatgcgcttttggagcagcacatatacctacagcaaatgtttcatcatatgtgcgacaccatgttcgtcattggttaaggtgacagcatcggctatcgatttgatgtcttcccgggcattgcccatcgctacaccttttcccgcagcctccagcatcgatttgtcatttaaactgtcacctacagcagcggtttcctcgagcggaatattcagctgttttgcaagcctcttcagcgcctgccccttggaagctttgcgggaagaaagctcaaagttgtgctcagccgaactgacaagcgtcaaatcttcggcatgctcatatcttttccagcctgcctcaagcttttctttgaagaaagaaaagccgagaatattgtaaaaatcgattggctgatcggcttcaaacagctcttgaaaagagttaatgtaagcaaagcccgattggctgtattgcacctcggccgcctgcttaaggacagaaagatccgcttccgggtttgcgcttctgaatctgtccagctcaacatcaagaagttctctgccgttttgcggtgtataaatcgctgaacctgtgaatacctcataataatagttttccgactcaagccatgagagaatatcatacgcccgtttcttatcaatcgtttcgtgatgataaagcctgccgtcgggatcgtgaatgacggcgccgtttgcactgatgacccatgttttgatccccagcggttcaaagattgacatgacgtcaaaatgagcgcgcccagttgacaccaccacttcaatgccatcccgctgcgcctgccgcagtgcgttttcattttccaagcttacctgatgcttgctgttgagtaaggttccatctaaatcaatcgcaattaatttcacgtttgtcagtcctttccttcatcctgctctgtcacgagaagctcaacgccgtttcggtcaagcaagtcacaaaatgcctgattcggcagcctgtctgtaatcaaaaggtcgatttcattcagctccgcatactgataaaaactggtgctgcccagcttcgaatgatctgcaagcgcgatgacctgctttgcctgctgtatcattttccgcttcaccatgccatcctcttcatgcgcaattgtaatgccatgttcggaaataccgaccacaccaatcagcgctttatcaacatggtagcttgagagcttttcaatcacagaggacccgtacagaaagcggtgctccttttccagcttgcctcccagcagataaatttcaattccctctttatcggacagcacatccgcaagattaatcgaattggtgattaccgtacaatcaaccgcattcaaatgctttgcacatgcttgaacagttgtagaggcgtctaaaatcacccggtcaccatcatgaataagcgatgctgcaagcctgccgatcttatttttttcctcagacactgttttcaggcggccggaatagctttgaattttctgatgcacagtcggcaaaatggcgccgcctcttgtgcggatgatggcattctgttcctcaagtttcacaagatctcgtcgcgctgtatcccttgacacttgcaggagcgtacagatctgttccgttgtaattcggttatgctgttttaaaaaatccaaaatcgctactaatctttcttcttggtacacgccctcattccttttctcagcaatcatttataagtaattataagtttttatttaattctattcaacattaataagtgattttaagtaaaaatacgtcgagagaaccaatttttcctaagtggacaaaaagaaagaaccagtctggtcgactggtcaattttgaggggatgatgcgaagattcggataatggtgaatggatagataacgggaggagcaaggggtgtcaatcagcagctttttcccggggtttagggtccataaaacgaacagtgtcagccaacacttctgttacatacacgttaacgccttccgcgttttcatagcttcttgtctgaatccgtccgcttactccgacgagagaacctttttggcaatacaacgccgtgttttcagctgtttttctccaaagtgtgcaattgacgtaatcagcttcgatttcacctgaagcattcttgaaactgcggttcaccgcgagcgtaacatgtgcaactgccgcaccggcggaagtgtagcgaagatcaggatcttttgtaagacgtccgacaagcatgacctgattgaacatgcgattcctcctctccttgcggttgtatgtattgtaaatgatgcaacaagaaaagaaaaacgcttaaaaatggctttcagcctctgtttttatctttcgttttcatttttccttcagctaaaaacatcttttgctttttccctttgaagaaatatgtactttttaaaaaacggaaaaagatttgctttgtcagccagttttgcgtattcatgcgcacataggaagagccatcccacgcaaaccactgaaagctcaattttttttccggcattgacagcttgattttatactgctccatgccatcttgtgtttcgtataaaaaacttattcttccttttttgttcagatgaacctcaaacacttctttacggcttaacatatatgttacttccttttgaatcaaatggctttcagaaggagcgccgtcaatataaatttcttttaaacgaaattgattcataccacatctctccgtaatccatagtcagttacagtataatgaaaaaatagaaattattaaatgtttcgctcatacaaaattctttagccccagcattgcaggattttttcctcgaaaacgtttatgttataatggaaggcaagaaaactttggaagtaatcggggtgagaagaaatgaaaacctttaaactggttgacctgaatgtggaacgagtggacaaggaagaacaatcaatcgaacagtttccccttattgacggactgattataaataaagaagacggtgaaaatcactggctgattgaggcgcttgtacagaaagaacatctgtctttttttgaacagcttcaaaacagccaatctgaagccaaagtatttgtaacgatcacgaaaaaaagcaatcgccccgcccagctgacagcagcagtgaaaaatatcgtcaagctggaagaaagcatccaggttttactctatggacaaatggtaacaagaaaacagcagggcactgaaaccattctcgagtcccttgtaaaagagggctatacaggaacaaaactcattgaggcatttaaacaaaagttataaatatgagggggcatgttccccaaaacagacacagaaccgaagagcatcacaatagacatttagaatagatatgttctgcatgaaaaaagctgccgttttgaacggcagcttttctcttcgtgctttcactcttgcatatttaatttgtatggccaaaagaatcaaccaattcccctttcacaacaaggcgcccttcagttttgacagccttgtcacatgtgattagcgtaatctcttttttgtttgtctcctcaactacatctgcatccgtttccgatatgatgtctttagatgttacagaatagatataatcctttttaaaatccgtgatgacaatttgggcacctgtttttatattctccagaggtccgaacagaagattcttttgcttcaaatgatggcccgccaacggataatttccctcacccattttttgatccgggcgcattgttgccgcccctatcaaaagattttcattggttgtgccttttacgatcggaagctccagatcgacacttttaattgttatctgccgccttgattgtgaagtaaaaataagtatatttcacgtgctttcgacgttctccacttgactggaatgctttaatggcgatcccggcatctgtagcttcaggctttccttcagaggaatcagaaatctcaaactctattttctcagtgttcagcacataaccggctggcgctttcgtttcaacaaaagcgtattgtcccggtgcaaggcctgaagctgtgactttatgatgccggatatgactggtttcgaagtctgtatgaaaattcgcgaacgattcagcatggtggatcttccggttctgatcattacagctgccattatcggccatgacaaatacaaggcttttcatgccggagcgaatgacattttgcaaaaaccttatcattactctgaatttatggcgcgtattcaaaacctgatcatgatgaaacatacagcaaatcaagccacaagaatggaaatggcgtttctccagtcgcaaatcaagcctcattttctttataatgtattaaacacgattatttctctcactcatttggatattgaaaaggcccgggaggtaacagaggaatttaccaactatttaagaatgagttttgactttcaaaatacatcagccatcagttccttcagacatgagctttcgattatcaattcctatctttctatagaaaagacgcgattcggtaatcggcttgaggttcttttcgatatagatgaagacattgactttatccttccgcctttaatgattcagcccttggtggaaaatgccgttcttcacggtgtcagcaagaaaagaggcggaggatggatcaaactgacagctaaaaaacaaagcaaaaatgagtatcacatcaaagtagaggataacggtgcggggatgcctccggaaaaacaaaaagatctcttatctgcggatttcgatcgcagcgtcgggttgaaaaatatcaatcagcggctgaaacatttttgcggaagcgagttgatgatcatcagcactccggatgcaggcacctctgtctcaatgctcattcatctcgctgaaacaacagaaagccccgcgggactgaaggacatagaacgaacctaaacgaaaattgagataaaaaaaagacgccgtttataacggcatcttttttattccggcgactttgcttgctgcttcagcaggtctctgatttctttcagcagctcctcctgcgcatccaccgcttcctccgcagcctcttcttctgctgcttcttttttgcgccttaacccattcaaagtccgaatgacgataaaaatggagaacgatataattaagaagttcacaatcgtctgtataaagctgccatacttcactacagcatcgccaaacgtaaacgacaggcctgaaaagtcaagccctcccagcagcaaaccgaccaaaggcataatgatatcatttactagagatgtgacgatctttccgaaagcgccgcctatcacaacaccaatcgcaaggtctacgatattcccccgcatggcaaaggctttaaattcattccacatacaatcacctgcttttctatatttgtaaagaaaaaaagacaaatgtgccgctggccatctgccttttttcaattattctccgagggcaaaagtcagttctacttcgcaaacgacttcgccatcaactgtggcaacgccttttccgcgcccgattgtgccgcgggcacgaatgatttcaacctcaaggtgaagctggtcaccaggcttgacttgttttttaaagcggcagttatcaatgcctgcaaaaaaagccagtctgccgcggttttcttctttaatcaacatcgcaacagctccgacttgagcgagtgcttctacgattaatacgccgggcataaccgggtactgaggaaaatgtccgttaaagaactcttcattagcggttacatttttatagccttttgcccgtttgccctcttcaacttccgtaatccgatccacaagcaaaaacggataacggtgaggaataatttctttaatttgctgagtatcaagcattgtcttgacatctccttcatctgcattagtatgtatagcaatcatcaaagatccaatctgtacatttgaaaagtatattatgaattaatctctttttcaaccgcgctaaaatgtaaccaactgtcaatgagagccgtcaaaagttatgatatgataattatagattttaccaatagcaaagaggtaggaaaatgatttcgaagtttattgaaaaaagaatgctaaacatgttagacgagtggtattccgcaatgagcaaacgcaaaatgaatcacgtttgcacactgaaagagaaaattgaccagcaccttccaaagatcaaaaagaacacaaaactttggatgcgttatcaattgtttcaggcccgccatcagctgctttttgaaaaccagaacggactcgattcattgttcgatgacctatatggcctggaagacaaaatggatgatgaattgaaatattatctgtattttttctctgggttatatgagatggtaaaaacagctccgaaacatgcagtacatcattttaaaaaagctgaacagtacctggccgccattcaaaatacgtttgaagccgctgatttatattatcaaaccgccggcgcctattacttgatgaaatcaccgccgctttccatccaatacgtcaaaaaagcattacacatctatttgcaccaattcggctatatcaaaaaggtaatcacctgtaaacttttgctcgccgtgaattatattgatcaagaacgctatgaaaaagctgaacagcttttcaaagaaatcattaagaaaacccagcaactacatgacgaaaacctgctatgccacgcttattataaccttggctttttaaaagcgaccgagaaaaaagaccaggaagcgcttctttactttagaaaagtattaaagaatcaagaatttgaaatgaattcaccagtctcatatcttcattgtgtgtacgagtctgtcagagcgctttttaaaacaggaaacatcacagaagctaaagccgtccttcaaaaaggaaaagaattatctgaaaaggtagacattcaaaccatttatttaaaattaaaaacgcttgaagccctctacacctcagtggaagatccctatgagcagctgctcgaatatgtgcttgaattagaaaaaatcgaggcgtgggtggatttagaagtgctgttagaagatattacggaatactacaaaaaaaaggacgatttcgaaaaagccgctttttttatcatgcgcggctgattgaaaaacgcccattttcttattatctgactgaattgattaaaccgagcatttgatctcccattgtgatcgttctgctgttcagctgatatgaacgctgggacgtgatcaaatctgtcatttgttctgaaatatcgacattggacatctcaagtgagccctgctgcatgccgatgttttgtctattagcgccgtttagctcttcaaaagctgccgcattatcaatagagaaaaggttattcccttcggatttcagctcttgagggttattcacttggacaacgccaagattaaaccgctgaaccgcgtttccgtcagatgcggttaaggtgccgttcttattgatggtgatattcttcattgagctgtcgatgttcactgtattgccgttctcatcaagtacgggatacccatttccagtgacgagctgcagctggttggcattcgcagcggacggcgttacatacagcgccccgtccctcgtatactggcggtttccatttacatttacctgaagatactggtatggagacgtaaatgcgatatccagatcgcgatcggtcttctgaatgcttccttgatcagagaccaggcgtgaattcatcatcgctccgacgccaaggcgtaagccgggcggcgttttgcgggcttttgccacttcctcgtttttttcatcaacctgatcgaattgctgtctgacaagctcagaaaaattcgtatcttttgccttatagccggttgtgttgctgtttgaaaggttgctgctgattgtgtcaatctgctgctgcagctggtttaaggttgttgatgccgttagcattgacctgagcatagttgatgtcccccgttttttcttccgttatcttaaatttttccaatttcatttgctgctttatccatacttttatcgtaagcctgaataaccttctgattcgcctcaaacgatctgtacgcttcagtcatttctgtataggcgcttgtcacatccacgtttgaaagctctgagacgccttgttttaatgaataggatacctgattgtttccggctgcgcttggcagatcattaccgtccgccgtgctgtacaaatcatttccgtcccgtttgagagtgcggacatcttccgccattctgacatcaatctggccggctgtgcgtccgttcgttgtcacagtaccgttttcagacacagtaaaattctcattatcaacagtgattggctggcgatccgtcgataaaatagggcgtccgttgatcgtcagctggttgttctcatttagtgaaaatgtgctgctttttgaataacggattccatccgctgtttgaaccggataaaaaagagcagctttttcattggtttccgcattcatcggaacttgattttcgatcaatgcaatgtctgtaggctgatctgtggacttcaggcttccctgtgtgaagagaggcttgagctcctgcatatacactccggtattcacggaaccgatttccgtcctcgatgtcccggccggagattttgattctattctgctgagcagcatttcagggaacgcgcgcatcgagccttgatcagctttatatcctgatgtatttgcgttagcaatattatttgaaagcatttccgttcttcgctgctgggcaatcattgcggatgttgctgtatataatccttttaacaaatttcccacctctaaaaatggcattttttccagttgtcatataggaacgttcgttctataataaaaactcagtattttatcctattatcgtcatttaacatcttttcgtgaaggctttttcataaaaaaacctcattctttttcagaatgaggtttgtgaaatcagcttagtttgcgtttaggaagcttgtccatattatcaagcatgacacctgtgccgatggctacgcaatccataggattttcagcaacgaggaccggtaccttcagctcttcagcaagcagctggtcaaggccgtttaagagcgcgcctccgccggtaataataacgccgcggtcaataatatcagcagaaagttcaggcggtgttctttcgagcacttgttttgcagcctgaacaataacagcgacagattcacgaagggcttcttcaacttctttactgtttactgtaattgttcttggaagaccggaaaccatgtcccgtccgcgaatggaaatttcctcgtgacgtgcgtctgggaaaacagttgcgactttaatcttaatatcctccgcagtacgttcgccgatcagcagcttgtactcgcgtttgatataatttaagatttccatgtcaaacttgtccccagccattttaatagaagaggaggtgacaatatcgcccattgaaataaccgcgatatccgtcgtcccgcctccgatgtctacaaccatgttaccgcttggctggaatatttccatacccgcgccgatagcggcaactttaggttcttcttcaaggtacacatgtttcccgccgcttttttctgcagcttctttaattgctttttgctcaacggatgtaatattcgtcgggcagcaaatgagcatgcgcggctttgagaacaggccttttacattcagcttgttaataaaatgtttcagcattgcttctgttacttcaaagtcagcaataactccgtctttcagcgggcgaatcgcaacaatattcccaggtgtacgtccaaccattcgtcttgcctcttcgccaaccgccagcactttgccgctgtttttatcaagtgcaacaacggaaggttcattcagaacaattcctttacctttaacatggatcagtacatttgcagtaccgaggtcaataccaatatcccttgcaaacatctatttatatcctccttgaaaatctgtttcacagtaaatatccacattgtgccctaattatatatattatcataaaatatagaaaaaaagttggaagcacaataagttctttacaaatttttgcggatgttttatgaacgatttcaagaaggcaatgccaggtgattacgattgctgaacaggctctccttcgagaatttcatcttttttatatttgagctttgtcgcttctcctcctcttaaatgcctgatggatttatgataatcgagtatttctttcacttcgtttgccaagtcggggttaatttcaggcagacgctctgttaaatccttgtgtactgtacttttggaaacaccaaattccttcgcaatgacacgaacggttttctttgtctccacgatgtacttccctatcttgattgttcgctctttgatgtaatcgtgcacaccactcgacctccctaaaatggatgtgagaagtgtgaaatgagatccgtattctgtaaagagtcgttcattatgccgcttcttcgttgtatggttttaaaagtaagtttgtgaaatatgcccacgatccctcacctcaaacactctctttgttaggtttgtaacagtgtattagcattcttttgggaatatgctaaaaactcaataaggacaaggggtgaaacgaactttttcagattcagcaaactatttcgcgtcactaaattttcatctttacaactattgatcgctcctgtaaaatgaaataagcaattagttacttaggtaagttttttagaaggagaccgacatgtcctacgtcaacagacacctcattcatcaaatcaaccaaagcgcccgcctgattgccaagaaagccaatgaacagctagagccattcggcctttattcatctcaatggtcagttttatattgtttgcgtacgatcggaccaatgactcaaaaagagatttggtcctatttaaatgtggaagcgccgactgtgactcggacgatcaaacgcctggaggagaacggctgggttcagagacggcaaggtgaagacaaacgggaaaaacttgttgtcctcacaaaagaagccgagaaaaaatacgaagaaatcaatgtgaaaatgttgaaattcgaggaagagctgcttgcagatttccgggatgaagataaagaagctttttctcatttattccgcatgtttttacaacaatgaaaataaggaagtgacatacacttgaaaaaagcggatgcgatatggaccaaggattttattatggtcctgcttgtcaatttatttgtgtttgtgttcttttatacatttttaactgtattgccgatctatacactgcaagagcttggcggcacagaatcacaaggcgggcttttaatcagcctgttccttctgtctgcgatcattacacggcctttctccggagccatcgttgagcgtttcgggaagaaaagaatggcgattgtatcaatggcgctcttcgccctatcatcttttctgtatatgccgattcataacttttccctgctgctcggattgcggttcttccaaggaatttggttcagcattttaacgactgttacaggtgcaattgccgctgatattattccagccaaacggcgcggtgaagggcttggatactttgccatgtctatgaacctcgcaatggcgatcggacctttccttggtctgaatttgatgagagtggtaagctttcctgtattctttacagcctttgcgctgtttatggttgcgggcttacttgtttcgttcttgataaaagtgccgcaaagtaaggacagcggtacgactgtattccgttttgcgttctcggatatgtttgaaaagggcgcactcaaaattgcgacggtcggtttgtttatttctttctgttattcaacagtcacatcatatctgtctgtattcgccaaatcagttgacctttcggatatcagcggatatttctttgtttgttttgcggtgacaatgatgattgcacgcccgttcacagggaaattgttcgacaaagtcggaccgggcattgtcatttatccatcaatcctgtttttctctgtcggactctgcatgctgtccttcacacatagcggcttaatgcttctgctttcaggggcggttatcggtcttggctacggatcaatcgttccttgcatgcaaacattggcgattcagaaatctccggctcaccgctccggttttgcgacggcaacgttctttaccttctttgacagcggaattgctgtaggatcgtatgtattcggattgtttgtagcatctgccggcttctctgccatttatttaacagcggggctgttcgttttaattgctctgcttctctacacgtggagccagaaaaaacctgcagaggctgaaggaaaagtgtctattgcagaataacttgtcagactgccgggaaatcccggcagtcttttttccattaaaacacggcgccctctcggttgaacgagagaacgccgcttatagcaattattcaatgacaggccgcgcaggtgaatcaggatctaacgaaaaatcataggacgcttcatcacgaaacatcggatcggcatatatggattgttgatcgttttttgttgcttttcgatacgaagaaaatgaatcatattctttctttttccacatccatatgccgtcttgatccgcttccttgtggtacacgttatgattgaccgtattaccttcgttttctgtaaagtcgtttccgataaataatctggaatcaccggccgtcaatatattcttttcaattgtgttgtttttcgtatcgtactgcagcagcagctgtccgccgtacagtccctttgtgtcattccggtacataatattgcgggcaatcagagaattgctggtgccgccccgctttttgtcatatcctccgattgaaataccggtgtacgcattgttgtacactttgttgtctgtgatctgaatggcatttgcatactttcctttgtgttcagacgttgcttcaatcccaatatcgttatcgtaaactgtgttgttcttaatttcgatatcgtgtcctccatcgacataaatcccgcccgctgagtattcatctccataagcaggattgccgtaagtcgagttttgataaactgtattgttttctacgactccgtttcgcacgtaatcgtttttatccgcggttccctcataaccaattagatcaatcccgatgttattattgttgcggaccacattgcctgcaactgtgaagccgtcgatattaccgttcagcacaactgcttcactcgctccaagcgtcagtttctcaactgtattgtcctcgattcggatgtctttcatgctgccagtcccataaactgcgattccgtgagcatttccttcatccgctgttgtcttaatcccccggatgtgattatccttaatggcgatatgactgctggaccctgatacataaatccctatagcagttgcttcctcagatgaaacagaaagatcttgaattgttaaaccgctgatggcaatgtcatgtttatcgtgaatacgaataagcggtgtttcatattcagcgttcgcaacggattcaccgctaatcacgacgttttcattttcatagtttcggaatgtgataggctttccgtccgtaccgctgtgctttacatcaagggtctcatgatacgtgccctcccgaatcatgacagttgtgccggcagcagccttctcagatgcgtgtgccaatgtacgaaacggcttttcttttgttccttcattttgatcactgccatttggcgaaacatacagataatccccagatccttcctcattcgcttttgtcttatcataaacgaaagcgaggatgacagacgttaaaacacccgccaaaagaataaaataccattttctcattttcgattcccatttcgttttagaatagatttctaaaaccattataaatgttctatttatggaaaaccatttcaaaaatatgaaaatataccgtctaaatagatcttattcagcctggcggacctgcgcatgttcaactgtttcaattgccaatgatgcaggcgggtgaacacgcatcagaacaatgtagaaaagaaaggaaatcagcacacctacaaaccaagaaatatcgtataagctcttcaatacaggaacatacatgccaatcagcgaaatcagcgctcctaacattgtggctgcaaacgcacggtaattgtagcccttccaatacacataccgtcctgtttcggaatacaggtcatctaccgagagctcacgtttgcgaatgataaaatagtcggccatcatcacgcctgccaccggtccaagcatgccgcctattaagccaagaaacgcatacacgcttgtcgcgctctccatcagcttccacggaaccgtaaataaagcgagcaacgctgtgataaagctgccacgtttgaaattgatatatttcggcagggcattcgctatatcataagcgggtgatacgatattcgccgcgacatttacagagatcgtggcgatgcagagtgtgatcacggacaagacgatgacataagggttatcaaaccgcgccaaaatatcgacaacatcccaaatcggctctccgaacgcgacctgcgagccggaggtcaccgtaatacttgcgaatgcgaacagcgcaaacgttcccggcaaaccgtaaaattgtcctttgatttgctctttttgtgtttcagcaaaccgtgtaaaatcaggtatatttaagatcaatgtcgcccagatgccgatgatgccagtaactccggcagcaaacggccagaatgtttctgaaaacgtatgaaactttcctggttgagagtatatcgggcccaatcctccagcaatatcaacggcccaccataccatgccgccaaataccagatacactaaaggccctgcccacacctcaaaacgtttaatcgactccatgccgtgatgcaatacgagtaaatgaatggcccaaaagaatacaaaggaaagcaaaccggacaagtgaatgccgagaatgttccactcgccgccaatttctccccaacctggccacatattcaaaagcaaaatgttcagtgccgtgctacccgcaaaggtctggatgccaagccacatgatagctgtaaacgcccttagaagcgcggggatattcgcgccgtatatcccgtaagaagcccgaatgatcactggaaacggcagcccgtattttgtccccgcatggccgtttaaggcaagagcgccaaataggataagtgatgccgtaataatgatcgccagcacctgccaaggcgaaaggccgatcgcaattaatcctcccacggtcgcgtaggtcggtatgttatgtatacatcccatccaaatggaggcaaagttcattgctttccacgtccgtttttcctgtcccaaaggcaccagatcttcattgctcagcctgttggattgctgctgactctcttttaatttcatagccggctcccctttccatattgtctatatgtcgtcacacgttatgttttttgacattagatgtcacttaatataactgaagagtcagacaataacactggctatgatatacaattttcccgtttgtatttgaacaacttaaacaagaaaaagagacagacctcagagcccgtctctttcttaagatgcagttttcattaatgcagcaaatctcacagccattaacaggcttgctccgcccgctataatcataatgattcccatcatatcaaaatgggctgccgtgatttctttaccaaaaagaatgccaaggatcaccgaagacaaaatcgatcctaggtaacggcaggtttgaaacaggcctgaagtcgttcctaccatgttggaaggactcgtttccagcatcgctgcctgaagcgcgacattgcccagtccgtagcctatacccaagagcgacagaatgaggcctttaccgatggtctggacattgataaaaaagatggttaagagcacggctccagccgtcatcaaaagcgctcccgcaaagatcggcttgacgacaccagatcggtcgatccatttgccggttagaggtgacacaacgatgctcattccagacataaacagcataaacaggccgctcgtttgaacagaaagatgcatttcatcctgaaagtaacttggcaaaccaaaaaataaacaatagaagaaaacattcaataaaataaactgaacatacacggctgacaggtttcgctgtgttttaaacagacggacatcaataaacggcttatccgttttcagctcgcgccagacaaacgcacagagcagaagcaagccaagcacaccttcaaccgcatgcggcgacgtgctgaacgacagcaaaaaggatagaaggaaaatgattcccccggcaaataaaacaattccaagaatatcgagctgccgaataatggttttgattcctgccccttttttctgatctttcgggaacatatacaggcccaataagaagctgaggataataaacggcaaattaacgataaagatcgccggccagcctccccatacaatcaaaaacccgccgactgtcggccccagcgccgtcatggcggacgcaaaaatagagagtacagccaaggctgaagcttggcgctcatgaatatgattccgaatcaagccgacacctgacggataaatcgcactgctccccaccgattgaaacagccgcatgaccaataatgtcataaacgtcggcgcaaacggcgccccgatggcagaaaccgcaacaagaataagcccgaataaaaacaagcgtttccgcccaatcaaatcaccgagctttcccgttacgggctgcgctacggcactcgccaagtaaaacgaggaaatcagccaggaaaccgttgtaaacgagaggtgaaactcatgctggatgctatggagcgcaagagagatcatagacgagttcagcggattcagcattgttcccgaagccacagctgttaaaaaaacagctcggctttttttcgataacatcatttcacttgttccagaaactcttccgttgtccgcgatttaccgattctcgggaaaataaagcgcagtgtggcttcatgctcttcatcgctaaatgtggacatggcatctgtaataaaaatctgctgatagccaagctgaaatgcctcccgtgctgtgctttccaccccgatattcgttgcgatgccgcacaatacaatcgtatcaatgccgcgacgtctcagctgcaagtctaaatctgtgccaaaaaaagcaccccattgccgttttgtcacagtataatcgccatcctgcacaccgatttccggaacaaattcggcccagtccgccggcatttcccctgaacctccctgcgcaggctcatccgtttgcggcttcagggcgtccgctccatcatgaaaggctacatttacaaagctgatgaacccgttatgtttccgaaattcatctacgagctttttcacgttcgggacaacctggccgctttgatcaatcggcacaatccccttttgtaaatcaatgataaccaatgctgttttttgaaaatcaatgttgagtgtattcatcatacgtctcctcctgatactgttagtgtttctcacattgcatattttactcttcacactgcctaagttcttttatgatgcttgtgaaattctcagaaggagcgttttctcatgatttttcttttatgtaatagtaacaggttgtgcatacgaacaaaccggcaagcacagtaatcataaggggcgtcatcacttcatcacctgcctgctgtctatcggttcctgcctgaaaatgcccatgaatttgcggcggtccatccaaagcaggataagacacataaccattaatatcgtgctaagatcctgcacgccaatgtcaaaacaatagttaatcaagacgatgttcacaataatgggcataaaaataaccgcccctaatgcagccgttcgcggaatcagtaataaaacagctgccaggatttcaccaaaacctataaacagttcatagacatgagaataaccgaaaaatgtccacgcgatcgtaaaccccttcccggcagccgcctcgatttcaggcgtcacctcgccaaactggccaattaccactttcgccagaccgtacacgaaaaaattaaaggctaaaaacaatcggaacgtcgcgggaatcgacttgcgtaccgctttcctcagcctgccgcctttcttcatcatacatccccctcagtgtattatttgatatagtacacttaatacagtatatagtattctaattaatgtcaattcccttttcagctcatatgaatagctgcttttatagatacaaagtcttatatcgtaaaaaatgtcgttctcctttctttccgtccctcgataacatttcttaaaaaccatgttaggaaatcttacacgaaaatgttttatcattcttttttctctataatgaagaaatataataattgctttttattctgaaagatacggaggaatgagacatgcaaatgggcgatacagtttttatgttcttttgcgctttactcgtgtggctgatgaccccgggattagcgttattttatggaggaatggtaaagagcaaaaatgtgctgagcactgccatgcacagtttctcttccattgccatcgtttccatcgtttgggtgctgttcggatatacacttgccttcgcaccaggcaattcaatcatcggcgggctggagtgggccggcctcaaaggggtcggatttgatccgggagaatacagcgataccatcccccactcgttatttatgatgttccaaatgacgttcgccgttctgactacagcgattatttccggggctttcgcagagcggatgcgattcggcgcttttcttttattctcggttttatgggcctctttggtttacacacccgtagcgcactgggtatggggcggcggctggatcggccagcttggagcgctcgattttgctggcggcaatgttgttcatatttcctccggtgtggcaggacttgttcttgccattgtgctcggcaaacggaaagacggtacagcgtcttctccgcataacctcatttacaccttcttaggaggagctttgatttggttcggctggttcggctttaacgtcggcagcgctttgactttagatggtgtagccatgtacgcgttcatcaacacaaacaccgcggctgcagccgggatcgccggctggatcttagtagaatggattattaacaaaaaaccgacaatgctcggagcggtatctggcgcaatcgccgggcttgtcgccattacgccggctgccggatttgtcacaccgttcgcttctattattatcggcatcatcggcggggcagtttgtttctggggagtattctcgcttaaaaagaaattcggatacgacgacgcgcttgacgcctttggcctgcacgggatcggcggcacatggggcggaatcgcaacaggattattcgcaacaacctctgttaactcagcgggcgcagatgggttattttacggtgatgcaagcttaatctggaaacaaatcgtcgccatcgccgccacttatgtttttgtatttattgtcactttcgttattattaaaattgtaagcctcttccttccccttcgcgcaactgaagaagaagagtcacttgggcttgacttaacgatgcacggggaaaaagcatatcaagattctatgtgaggagtgacgctatgagcggtcaaatgttcaaggtagaaattgtaacgcgtccggcaaattttgaaaagctgaagcaggaactcggaaaaatcggagtgacctctctgactttctccaatgtacacggctgcggccttcaaaaagcacatacggagctctatcgaggggtaaaaatagaaagcaatgtatacgagcgtttaaaaatagaaattgtggtcagcaaggttcctgttgatcaagtgacagagaccgctaaaagggtgctgaaaacgggatcacctggtgacggtaaaatatttgtctatgaaatcagcaatacgatcaacatccgcacaggcgaagaaggacctgaagcactttaatatcggtacgagattcggacactccggatctctttttttgtgcacagaatcccccccagaaaccgcgattcctcttcgaattctcttcaagcgccgttatttcagacaatctctatttttatttgaaacttttcatgagtaagattagtctactaaatataaaaatgtaaaaggtgattatttgaactacgaaatttttaaagcaatccatggactatctcatcacaattcagttctcgattccattatggtcttcatcacggaatatgccattgtcgcctatgcccttatcctattggcaatctggctgttcgggaacacacaaagcagaaaacatgtgctatacgcaggcatcacaggaattgcaggccttgtgatcaactatttgattacgcttgtttatgtcgaaccgcgcccgttcgttgcgcatacagtgcatacactgattccgcatgctgcggatgcttcatttccaagtgaccacacgacaggtgcattagcgatttctattgcgatgcttttcagaaaccgcaaaatcggctggccgcttgtcatttttgggcttttgacaggcttttcgagaatttgggtgggacatcactatccggtagatgtattgggcagcctcgttgtcgccatcattatcgggttccttttctttagattttcagatctgcttcgcccgttcgtcgatttggtcgtgaggatctacgaagccattatcaataaactgacgaaaaaaccaaccgatcaaaatttctaagaaagacaaaagccggcgtctgaaatcaagacagccggctttaatatttctcatacatctcttgttttcttcgcttcgccaacacatataaaccataaaacaacccaattccaacagcatcgatgagcacatcccggatacaaccattcctgctgaagaagagctgaagaacttctgtgaaaaaagcaaacgcaaatgagccggctgcagctgatcttatgctgccccgctgtttccacagcaaatatgtcagcacaaagaaggaaaacgcgtgtccgattttttgaataaacgcttcaggtacagtaagctcagtaaaatccataactaaaaattgagacagatcagggtgcggctgaaaatgaaaagccaccgtttgcgatacgaccatgccgctgaagctttccgtacagacagaaagcaggataaaaaagatccagcctgcgagcaataggcggttcatgacataacctcctttataacgtacgtgcctacatgtaactacatagacggtaaaacaaagcaaaaagtaacagaaaaaaacgcccatcacaaggatagacgttttcttcattaagactgttcagtgtcttctgttgtgctgctttctttagaaccagatttgtcagttgaatcatcctttttctcaccggatttttcttctgttcctttttcagttgatccgtcctttttctcggaagattgctgaatggattcttctgtttcttgggtggcagctttttcttcagcagctgctgctttttcaatagaagaaactggtttgtccataaagtttaacggattcattgcaaccccatctttacggatttcaaagtgcacgtggtttccgctgtcttcactgtaaaggttcttgccagattttccgatcacttgattttgttttactttgtcaccttgctcaacgcttacttcggaaagagattgatacacagtcgataaaccgtcggcatgttctacttccacaacatatcccagcactggatctttttcagctttaacaaccgtaccgctcagagaagcagagacatcgaaatcttttccgtctttctcagctaagtcaattcctttgcttaggctgtacgtgttattataggtaacgagtgctgcttctttctcttcttttgcggcatcggtttcatagaactttttcacaacagaaacgttttcagaatcaacaaccggcattgcgacattttccattgactttcctacttcaactgcatcgtcgttgttgtcatatgcggagtttccgccgttatcagccaactgatcctttacctcatcatttgatactgattgataccaaaggacagctgttaaaatgacggccgcactgactaagtaaattgcagggaacacccagcgtttacgaaaaaactgctgaagttttttgacttgagaagttttcttttcttcctctctcattgtttcatcacctcagcaacattctgaacacttttctgaaaatatatacaacctatccaaaaaaacttttttagatgtagtttgcacagactgaacgaaaatatgtatttttttgagaggagtgccaaaaacgtatgaacatgacattgcgtcttgctgaacatagagacttggaggctgttgtggcgatttataattcaacgattgcttctcgaatggtaacagccgataccgaaccggtaactcctgaagaccggatggaatggttttcgggacatacagagtcacgtccgctctatgtggccgaggatgaaaacggaaacgtcgctgcctggatcagctttgaaacattttatggaaggccagcctataataaaacagcggaagtcagcatatacattgacgaagcatgccgcggcaaaggtgttggatcatatttgcttcaagaagcgctccgcattgccccgaatcttggcatccgctcacttatggccttcattttcgggcataataaaccaagcctgaagctgtttgaaaagcacgggtttgcagaatggggactattccccggcatcgccgaaatggacgggaaaagatacgatttaaaaattttagggagagagctttcatgattagtctggataaagatgaaaacgaaattgaacatcataatgaagaaaatagccttgttgaacaggagactgcacctgttggacaggagagccgccagctgagcgcctccgctgtcaagtcgctatccgacattgccaagtggggcaaaatttctggcatcttgttaatcattatgggatcgcttgtcactctgtctgttttgatgacagtgattggcgccatcccgggcgtgctgctcattatatcaggcgtatttttgatgcgctcagcaaaagcagccgcggaagccgaaggaaatctagccggcagcgctggcgaaagcatgcttgaaaattacgggacatttataaaaatgcagctgttttatgcagcatccagtatcgttactgtcctgatcgggatcattgtagccattttcgtgctggtggtaatcggcattgctgcttttgagaacacgccttcgtatgatgatccggattcttattattatgaggatgatccggtgtttgaataatgatgagacaggacagggcatgagttccatataaacggaaccatgcctattttatttgactattcaaagcaggccggcgtaaacaccaaatcctgaagcaagtacaatagacatctctagtagaagaaatcaacaaagcaacgctgttacccagaaataaataacaaaaaaactacctatgaggtcggaatctatctgaaaccgcgctttttatttcgggtgtctgcatgcaaaaaaacacacccggatcgtctggaaaatctcaacaatccgggtgcagatcttctttaatacatttttttgcgtctgtcttcctcagtcaaaaattcaacaaaactccgcatcgcaaaaggctcttcctttatttgccgtgcgtaggagcttttccgctcttctgaaaggatttcgctctttttgatcctgttcagcatatagatgtgaactgttttttggatttgtttatgctgatagcctgcctctttaaaaaatgcgagcccgagcgccgccaaaagagcgaatatgcctgcgctgatcagggactccctgtcagctgaagcatgaaatagaaaagcagctaaattaaagagagagaatgcagcaagcggaatagcaagaaaacggtaaatgacggtttttttcatgaaaggctgtacggccttttgaattttttgcatttctgttttgatgaaccccggcatttgttcgactctgtaaaagttcatataatcctccccctttatttgatgtttcaagcttcacgaacgttacatatgtgtttattttaacgcaggtgcaagctggttttaaagaaatctgcccgtatttttcacgaagaatctggatcgccgctctttattcttttaaaatgtgagtgttataatttgtaatgggaatcagatcactgttattcatggaatactaatggcaatcttcttgataaatatgaatgagcggggttacaaagtgagtatttcttccatccttttatcactttttttcattttaaatattcttttggccatcattgtcatcttcaaagaacggcgcgatgccagtgcatcttgggcgtggctgcttgttcttttctttattcccgttttaggctttattttatacttattattcggccataatctcagacgcaagcatttgtttcaatgggaagaccggaaaaagattggaattgaaaggctgctgaagcatcagcttgaagatttagaaaccaagcaatttcagtttaacaaccgggcaacctttgataacaaagatttaatttatatgctgattatgaataaccatgctgtgtttacagaggataattcagttgacgtcattacagatggacgggataaatttcagcggctgctgagtgacatttcaaaggctaaggatcatatccatttacagtattatatttataaaggcgatgaattaggcaaaaaattgcgggacgctctcatccaaaaggcgaaagaaggtgttcaggtcagagtgctttatgatgaactcgggtccagaacgctgagaaaaaagttttttaaagagcttcgcgaggctggcgggcatgtggaggtctttttcccgtcaaagctcaggccgattaacctgcggctgaattaccggaaccatcgaaagcttgtgatcatagacggtatgaccggttatgtcggaggctttaacgtcggagatgagtatctagggcttaatccgaaattcggttattggcgggatacgcatatccggctgcaaggaacggccgtacacgccatccaaacacggttcatccttgactggaaccaagcttctcatcaccatacgctgacatatattccaaatcactttcctgattacggcccaaaaggcaacgtcgggatgcagattgtcacaagcggccctgattcggaatgggaacaaattaaaaatggctacatcaaaatgatttcgaacgccaagcgttccattttgatacaaacaccttattttatcccagatgcaagcctgctggatgctttaaggatcgcttgcctttcgggcattgacgttaacattatgattccgaacaagcccgatcatgcctttgtatactgggcaacactttcgtatatcggcgatctgctgaaagccggagccactgtctatatttacgataacggctttattcacgcgaaaaccatcgtggtggatgacgaaatcgcttcagtcggcacagcgaacattgatgtccgaagcttcaggctgaattttgaggttaatgcatttatatacgatatcaccattgctaaaaaactggtttcaacttttaaagaagatttgctagtatccagaaaattcacctatgaggagtatctgcagcgcccgttgtggattcgaataaaagaatccgtctcgcggctgttgtcgccgatcttataagatgtgcaaacccccggcctttacggccgggggttttcctgatggtcacagtaaatgatgatcgcctcccgcaaaaaagcggcaagaccttctccatattgattgattgaatcggtaaatcgctcgtcagtgatatacacttccccgagtcctctgaaaatgtcgagtgtgcaatcgtaatgatattggcaaatatgatcgcgaaatgcccccactgcggcctgaacctctgcatcatcgggcccatgcttcattcgcgccgcaattcgtctgtaaatcgaatcaaattcagccatgatcgagcgccaatcatctgccgagtatgcagatgtccttttctctgtttcttctgcgatttccttaccatacagctttctgacttcgtcagcgtatgtctgctgatgctcttcaatgtctttcatgcttaatccggcaaataaatccctcttattcatcgtttcccctccatcaacggacaaaagcgtcctgtcaattgtttgaatcatctcatccattctttgttttttcttcatcaatatctccttttgcgactgaagtgccgctttccggtcaaaattcggatgatccagcatctccttaatctcatccagacgaaacccgatttccttgaaaaataaaatctgctgcagtctttccaggtctgcgtcactgtacaaacgatacccagcatcagtaagcgctgaaggattcagaagctcaatattgtcatagtgatggagcgtccgaatgctaacacctgatatctccgccacttgtttaacttgatatttcatacataacacctcctcttttttatcgtaaacaatcacgcaacgttagggtcaatccccaaaatgttattttctatatacaaaacttctcacaaatagtgtataaaagaaaagtgagtatttttttgtaaaggggagccagtatacatgaatcctgaaacaatgaacaaaaccctcatcagcatttcgaaatggggaaaagctacaggcattttatttattattatgggcgcaattaccgcgctttcaggcgcgttcttttttctaatcggtgccgtgccaggcgtactgcaaattatttccggtatctttttgatgaggtcagctagggaagcaggccaaatggctgaacacaatagcggacagtctgaagacttaatgctggagaattacgcgaaattcgtaaagatgcaagggatttatttgatcgtaagcattgctgtatccattcttgcgattatcgccttcttcatctttttaatgcttgggattgctgacggccttttcagcgatacgtacagcacttattaatgagaaaaacccggagctggctccgggttttttattattccgcttcgcttaccactgtgaagcgttcatttttgtgttcgggatgttcaagctcgtccaacacggcaatggcataatctgcatagctgatatagctgtcgccttttgcatttacgatgacattgtcttttcctttttggtaagagccagtccgttttcctgctggatcaaaaaatgctgcaggactgaggaacgtccaggaaatgaagtctgtctgctgcaaatctttcaggttctctccttgatttgatgcagttggcaaatattctttcggaaattccggcgtatccattaaacgggttgttttggcttcatcaacaaacaggcttcccgctccgccaacaacaagcaatcttgtgcgcttcgcgtcctttaagatgttgatgagtgctcttcctgcttcaacatgaagatgttcttggccgggtgctgctccaaaagcgtttacgactgcgtcgaaaggcttgatgtcttccgcagtcagttcaaacacatctttttccaaaaccgctacgtcctgcccctgcacttttgaagcgtttctgacgatggctgtcacttcatggcctcttgttttcgcttctttcaaaatttcgtttcccgctttcccgcttgcgcctataataccaattttcatttttcatttcctccttatttgtaacaattttagttacatgttagcggtgagaagtcatcccttttgattaaaagagatgattcataacatcttttaatgacttgcttgccagttcattttccatcgctctttgcacactttcaaacgtttcatccagagcgttctgaatttttttccctaccggacatttcggattcgggttttcatgaaccgcaaagagttcttcttgcttttggacagcccggtacacttctaaaagagaaatatcagcaggatcttttttgaggcttgcacccggcacccctgcgcgtgatgtgagaatatcagcttttttcagcaggctgatcattcttcgcacaactaccggatttgtgttgacactgtcagcaatgatttctgaagatgttttttcatccatcgagatgagggataaaatatgaatggcaacagcaagacggctgttaatcatgttttttcaccaccgttgtaactataatagttacatttgattcgtttgtcaacatctaatatacactaaatacacgggttttgtgcaccgtttttagtcaatagaacggccggatgcactccggccgcgtcttatcaaaataagaaatatctttgtccaagtgggacataatcgacaggctggcaagacaattcctccccgtcagcaaagacctgataggtttttggatcaatctcaatctttggcaaagccgaattcagcttcatatccagcttgctcagctttctgatatttttgactggagaaatccttttttccagccctaagctttctgccacaccacgctctatgcttgcctgagacataaatgtaatcgaggttgagcggttggcttttccgtaagacgcatacatttggcgcatgaaaaccggttcaggagtcgggatggacgcgttcggatctcccatttgcgcacgtgcaatcatgccgccctttaagaccagttccggtttcacgccgaaaaataccgggtcccacagaacgagatcagcaagcttccctttttccaccgagccgacctcatggctgagcccgtgcgtaattgccggattaatcgtgtatttggcaatgtaccgttttgcgcgcacattgtcattcccgttttcaccggcaagagcgccgcgctgttttttcattttatcggctacctgccatgttcggatgatcacttcaccgacccgccccatcgcttgggaatccgatgatgtcatgctgatcgcacctatatcatggagaatatcctccgcggcaatcgtcgccgccctgattctggaatggctgaatgccacatcttcaggcactttcgcatctaaatggtggcagaccatcatcatgtcaagatgctcatccatcgtattaacggtataaggaatggttggcgttgtagatgacggcagaatgttcgcgtaagaggcgagcttcataatatccggagcgtggccgccgcctgccccttcaatgtgataagtatgaataacccggtccccgatcgcgtcgagcgtgttttccaaaaagcccgcttcgttaatcgtatcggtatggatggcaacttgaatatcagcctcgtccacgacttccatacacgttttaatggcgcttggcgtcgtgccccagtcttcatggagcttaaggccgatggcgcctgcttccacctgctcgatcagcggcgctttatcggatgcattcccttttcctaagaagccgacattgatcggaaactcctcggccgcttccagcatcctcgccatataccacgccccggacgtacatgttgtcgctttgcttcctgtagcgggtcctgttccgcctcccaaaagggtcgtcacacctgaagaaagcgcaacttccatctgctgaggacaaataaaatgaatgtgcgtgtccactcccccggctgttaaaattttgccttcaccggaaatcacctctgtccccgctccgatgaccatgtgtggatcgactccatccatgatatcaggatttccgctttttccgacaccgacaatccggccgtctttcacaccgacatccgctttgacaatgcctgtgtaatccaatagcacgacgttggtgataactaaatccaaagcgccgtccttccctgtgattctgccgttttggcccatgccgtcgcggattgtttttccgccgccaaagatcatttcttcaccatatactgtgaaatccttttcgacttcgatccataaatccgtgtcgcccaatctgattttatcgcccgttgtcgggccaaacagttccgcatattcctcccgtgacattttcatcggattacaccctccatccagccggcttgttttaagttggccaacgttttttctttgccgcgttcatcgataaacgtgtcggccattccgttcagccctttaattgtcttgcgtcctctgatttccactagtgagaccgttttctgctctcccggctcaaaacggaccgacgtgcctgatggaacatcaagacgcatgccgatcgccagctcacggtcaaataataaagccccgttggcctccgcaaaatgaaaatgcgaaccgacttgaatggagcgtgatccggtgttttttaccgttacctcccgtatctcacgcccttcattaatcgtaatggttccctcagcaatttgaaatgctcccggcttcatgacttcacctccgcagaaattggctgatgtaccgtaacaagctttactccatccggaaatgtggcctccacctgaatgctgtccagcatctcaggcacaccctccatcacatctttttccgttaatacatggcggccggcttccatcagctctgctactcccttcccatcacgtgcgccttccataataaagcaggtgatataagcagcagcctcaggatagttcagcagaacgccccgcgcctttcgctgtttggctaattcccccgctgcaaaaatgagcaatttctcttgttcaactggtgtcagtttcatctgtagtcctccttcttttgtcatataaagcagatgcggctactacgaatttgcggaacagtcaggcgggacatcacctccctttcttcgggaatgggggtcatacggtaagatgcctttcaaagcggcatgccgtttcttcatcagccttgccatggtcaacaaccgttcccctgtcgatcacggaaagatcagattaacgcgttttccagactgcgctcgactaagataacaaatgtctttttttctggaaatttctataataacttgtctgactagttcgacaattaaaatctgaattccttccaattgtttattaagtaaaatatttttcagatttaccatcagcgctctggcgattgcaagctgctgctgttggccgccttttcgctttgaacaaacgtttgattaaaataaatagcccccctgtttagccggaagcaggcctatggagtggatggccgactccatttcggcctaatacagcgacaatctgccccgggcgaagctaaggctgtgcaaaaccatcgattgatcataaccagacgttacattcctgatggcagcccgttgttttgctccgcaaccggaagtatggcatggaggccagtctgaggcgccgacctccacgataccgagaacccaactattgccattaactccgcatcatggacggtcacttcgctgatcgccaccgttcctcttaatgagtgaagaattccggccttcactgaatccccgcttgtgtcgatatcaactgttttctcgcactcccgtggcttccgacactttcttcggtgcagtacattcagccatcaaaacccctttgtttgatttcttcaaatgatgttataaaagtttacaacttatgtcatcattatatagaagaggcctattaattcaaagaatatttaaaaaatttagttaccttgaccaaatcagcttctttttttgttatatttattcacatcagaaaaagcgaaaaaaaaagacaagaaacatttcgtttcctgcctcttccgtacgattaatctttatctgaaaatttatccttggctttcccgatatccttttggatttcgccttttgccttatcttttttgccttcagcctgcatgtccgttctgtcagccatatctccgactttatccttcacttctcctttggctttattgaagccgcccttcattttgtcttttacactatcgttacccatgttaattctcccctctcaattatgtgtgtacttgttaacttcccgatctgagaggcaataaacattctaatgttatttatcgatttcgtagcgctctccgtaacggagcaccttgtatatcgccagcccgtctgatgactttttctccgaatatcggaccggcagcagggcaaaaaacacataatacgtagaaaaatagacaaactgatagaaaaacacattcggctttaatacactgtgtataatcagcagattgattgcaaaaatcgtgatgaggttaaacaagcagcctcctgcatacacgagtgcatttgagaatcgattgtcaattttcaactccccgtaccggcaaaaagaatcgataaaataaatcgttctgaaccgtatgggtccaattttaagcagcgtttttcccatgcctatatccaacgatccctttccgccaaaaataaaagccataaagctgtgccctgaaacatgtataatctgtacaagcggcagaacaatgaggaaagaccacagaaacttcaccatatcattaaaaccaaacattgaattccccctcacatgcatatctgcatcccaaaacggcttttgttcaaaaaacagtgctgtagcgatttttcctgttctccccggaaataaacgttccgatgctcccctttttttgcataaaaaaaaaccatctgccagcagatggttttgtctcatacttcatataaacaatcgttcctttgaatcatctctctcatgctgaccgctttttcataaaaatacaccgcttctttatattgttcgcgatgactgaaataagaggcagcatctaaagcaaattcttcaatatatacatacaggcccttttcttccatataatcaaatacttcttgaatcatatccaaattgacagattccacatataatgcctgcagaaatttatattttgccagactgaagaagtcgtttcgtttttgggcaatggcaatccctttttcatagtaccgtatcgcggcttcgctatcttgttttttgaaaagaacgcgagtcaggctgaagagcgcttttggaagctgttccagctgataatcctcgaagacaggaagcgctttttcaaagtattcggcggcctgatccagctcccccttgtcatcatagcaattcccgatattataaagggctgatccgatcaaacggggctgtccttccaataaagcaaggcgatacgcgtcatccaaatgctcaagcgctttttcataatttctgtagtctatgtagtttcctgatatgacgaaatggcattgaattcttctgactctataaaaatcgtgagccttatacgtctccagcgcctgtacagcgtggttcatagaaaagtgcgtctgcttcataatataaaagacttccgccactttaaaatgaaattccgctctttcaatttcatcttctacaaacgcaagcatcttctcagctttccgataaaaggatatagccgagatgtaattgttctgttcaaattcgtacattcctctaaacaagtgaaaataatactcagataatccggagatgctgtcctgattgctttccagcgttttgatcaattcacgatattgaagctgagattcctcgtgcaggtcaggctttacgtaatccagcataatttggtgccggtagctgatcagctgataatacaggagaagcagctgatcctcttccatctgttcgatatctagatcaatttcttctttcagctttacggcatcagccacttgaaatgctaaaatgtgcttataccacttattgattttcactcctacttgagatgacgggatctcgtacgcggccatgcccctccaaccctttctattttctaattggttatattttatcataatgtatggctttggaattaaattttcttacaatgattccttctttatgcctatccttatatatttcggtttttctacgtattttttgcactcggattctaataaaaaagcttaccggacagtgccgataagcttttgacttcaaattaaccgccaatataagacatttccactttctttttgccagatgcttttgatagcgtacgatcgactgaatactgatcgatccgatttttccatactgtcccgatcatttctgatagttcgtcatcacttaattcctggcgaaccggagctctgaggtcaaatccgcttgaagcgaataagcaggtaaacagctctcctctcgcagaaagacgggctctgttgcaagatccgcagaacgcatcagatacagatgatatgacgccgatttctccggagccgtccaagtagcggaatctggaagccacttcgcctatataattaggcgctatcggctcaaccggcatgtgttcattgatcaaatctatgatttccgcctttgtcatgacgtcttttttttcccattggttggtgttgcctacgtccataaattcaatgaatctcaggatatgccctttttctttaaaataacgggccataggcagtatatctttttcattgacgcccttttgaacgaccatattgattttaacaccgagccccgcttgcttcgccgcttcaatgccttccagcaccttgctgacagaaacaccgcgcccgtttatcttcttaaaacgctcgtcttctaaagaatcaaggctgatcgtaacccttttcagcccagcctccttgagcctcttagcataaacaggcagcagtgatccgtttgtcgtcatcgcgatgtcacgaatacccggtatgcgggccagttttttgattaattccggcatatcctttctcatgaggggctctccgccggtcaagcggattttttcaacgccaaatcttgtgacaaacaatgtcgcaagccgttccagctcctcaaatgaaagcagctcctctttctttaaaaaaggataatccgggccgaataattcggcgggcatacagtacgtgcatcggaagttgcagcggtctgtaacagaaatgcgaaggtctctcagcggtctgtttcttttatccaacatctgacgcgactctgtaatcatagctacagccccttcctactccctgattctctcagggtgtgtatatacattaaatgatccgtttctgacaaatccaatcgctgtgatattcaattcttcagccatttgaatcgcaagctccgtcggggccgatttggaaatgacaatcgacacgccgattttggccgcttttaacaggacctctgatgagattctgccgctgaacacaatcagtttgtcgcgtacggacatcccgtttagaaggcagtgcccgtatagtttatcaagtgcgttgtgccgaccgatatcggtgcgcatcaacagaagcttctctgtgtcgcaaagcgccgcattatggacgcctcccgtatcctgaaacgtcccgctcccttgctgcatgtctttcataagcgccagacatgcctcaggcgatatcttgatttggctgacagccgtcttggctgttttgacatcctgctgaaaataaaaatgacggccctttccgcagcatgagccgatcacccgtttcgtataatccttttgatccaatgtctcagggtgaacgaggtcgacatatacaaaaccgagactttcatctattgtaaaccttttaatttctttttgaaatcgtataacaccctctgatgcgagaaatccgatgacaagctcttcgatatgctcaggcgtacaaacgagcgtcacaaattcactgccattcagtatcactgtcaaagggaattccgtcaccatccggtcttctactttgcttatttccccttgttcatagcgccatacatccctgaccgcagttactttatcgttcaatgtctcttcccctccgcaatgttcctgcctttatattttttcacactcctcggattttgtcgaattctgagacacaaaaagagccctctatataaagggctttcacaggatgtgatgacggcggtgtttaggcagggcgcctaccgttccttttataacacgtgagcaccaatgtgcattgacaacaaacgcggggtttgtcgacacgctgagagccctctatagaaaggactctatggttgattatactgattcttttttagaaccgtaaacagcacaatagctgcgatcaaggtgagaatgctgacaaaaaagaaggctgccagttttagaagaacaccaagcaatatgaatgcaacggtggctataagaaaaatcattccgaataatttcatatgttcaacccctttttagggtatcattcccgcccaaactgtttttaaaccaataaaaaaaggcgcctgggggagcgcctgatctttaggttccttactcagtaaatttttgtgcttctttttcccaagcctgttcgaactcatccgcactgttcgctgaaatatattctccgccgccagcgacagctgcttgtttcatctcttcattacccttgacatcaaagttgaagccaatgatgtttacaatcgtatccacatttgatgcacggagcttttcgatttctgccgcagggtctccgccgcacgtttcttcaccgtcagtgattaaatacaccacgtttttcccgtctgcgtcaaatgcctcaaattcttttcttgtgtctgcaagtgctttggcaatcggtgtccatccagtcggcttgagctcactcaatgaattgtcaaacagggatccttcatatggatgaaggccgtaaatagtttccgtcgtactgcacgaaagggctttaccggacagtttattattccctgcatgcccgaaaacgcgaagcataagatttgtatccttcggaagaagttcggcaaaagattttactgattttttggcaatgtctattttgcgctctcctcctgttttttgaaccatacttccgcttccgtcaaacaaaacagctacatttgtatcagcctgtttctcagcggcaaaagacggggaggcaatggaaacagtcaacaatccaatgataccggcagccagcaattttttcatatgattacttcctttctttttcatattttccaactatatgttggattcttctttatgctagaatacgaaaatgcaaaaagatataggacatgctgccttttgtgctgctttcacgatctgtccaaaatcgcttgaaatgccgttcatttttagccatttccgcccagaaagcataaacagattgtgtgatcattcattcttttttcgccttgattatgacagaaaaacggaaatctgctactatgctacaggcagacagctaattagttttgaagtttttgttacatacaaaaagaggctgaccatcaccagcctcttttttcttatttagataacattagtgattgctgagtgaaaattttctcaacatctttttgggtataagccgggaagtattcaccgccgcctactttcgcaattgcgttcagctggcctttgtatccctctttataatcaaagccgatcacattaacagtgatattgtctttttgcagttcctttgctgttttaatcgggtttcctccgcacgtttcctcaccgtctgtcaacagatacaccactttttccccttttgcatcaagctggtcaaaagaagatttcgcctcgttcagcgctttggcaattggcgtccagccagtcggcccaattgtattgagagaattgaggaagctttgctcgttaaagctttggaagccgtatacgttgcgaatggcttcacatgactgaacttttccggaatttttattgtttccttcagagccaaacacgctcattttcacctgagttccttctggcagtgagctcgcaaactttgaaatttcttttttggctgaattaaatttagatacaccgtctattcttttcgccatacttccgctggcatcaagcaagaccgccacgttcgccggcgctttagcctccgtttctgacttttcagctgcaaaagcaggtgaagttaatccaaaaagcaatcctgtcatcatgatcagtgaaaatcttttcttcatgttcgtacccctttaccaatttgtttctgcgtgcagatgttcaacgctgaacataatctatcgtaatcaacaaaaaccgagaaataaatagggcgggcttccccattgctgttgtttacttttgcatagaaacctatgtttttattagtgatttccacctaacgcccctatgaaaagagaagattgtccgcctttcggctttcgttatatgagtctgtcgaagtctgtcgacaaatgtggatgactttaccacaatctcaaagcctgaaatcaggaaaaaaggactgatccttaaagacggccagaagctcctctaaaccgtttcagccgctcttagataaaagacattcaagaacagaaaaagacgcccaaagagcgtctttttctactttttcgccatgtatttattcaaaaacgcatctgcctcagaaatttgtgtgccttggtaatagtactttacaatgtcatcaaccgttttgccttctttggccataaaattcgctccgtattggctcatcccaacaccgtggccaaatcctctcgtcgtgactgtaattgtgtctccatttcgcttccattcaaaatcggcggagttgagacccagcttttcacgtatgtctcttcctttcagcgtcttgccgttaatgacggcagttgcgacctggtggcccggtgtctcgccggtaatcttccctactgcgctagatccatccagcttgacgccaagcttttgctgaaattctgccgctgtaaaggttttcgttgccttatatttcggagactttttatcccatgggcttttgacgctttttaaatatgggatagcacttgtccaataagcttctgcattctctgtgtagccgttgcttgtggagaaaaaggatgcttcaatcggctggttgttgtacgttaagattttgccttgcgtactggctaccgcagctgtgattttcttcagttttgtctcatagcttgtgccccactgttttttcagctccgctttgtttttatacacctggaacatctgtgtatcatccaccagtgagcctttaggagcctcaaccgctgaatttgacaccatcagtctgacaataaatgttctggcggcgagggcctgggctttcagtgcttcagattcaaaggttgccggcatttcggaggcgacgactccaatcacatactcttcaagcggaatgttttctacggattgatttgcggttcgatagacgggaatagaaacaggtgatgctttcaatgtttctgctcctttcgatgctggtttcgtgctgactgctgtcttttctgattctacactggcccccgcttccttattatgctggaatggtataaccaagagtgtgggaaccaagagaatcaatgcacatagtacggatagtgtgattgcgaattgtttcatattcagctgcctcctgctcgggattcgactctagtctagtctatgggcagggacaagctaatatgactctcgttttggacagaaactttatttgtcatttacgtattcttttttgctattttgcgcataatgatgataatacacaaaaaataaaaaaccagtatgccagagtgacatactgattttcaagtaagtttatgcatttaagtcagaaacgacttctttattctcttgctcagaagcagactcatcatttacacgttcgatgtctgcgcccagagcggcaagcttctgatggaaatcaacgtaaccgcggtctaagtgcttcaattcagtaacacgtgtgtgaccttcagccactaaccccgcaagaatcagcgctgcacctgcacgcaaatcagtcgctgcaacttcagctccctgaagctgtacaggaccgttaatgatgacagaacgtccttcaatcttgatatcaccattcatacggcggaattcttccgcatgcataaaacggttttcaaaaacggtttctgtaatcatgcttgtgccgcttgcacgaagcagaagcgccatcatttgtgactgcatatcagtcgggaagcccgggtgaggcattgttttgatgtcaatcggtttaagctctttcgggccgatgacacgcagaccttcaccttcatccttaattgttacacccatctcttccatttttgcaattaaagaggtgaggtgttcaggaaccgctccttttactaatacgtttccttcagtgattgcagcagcaaccataaatgtgcccgcttcaatacggtctggaataatatggtgttttacgccgtgaagcttttcgactccttcaattttgatggtgccggtgccagctccgcggatttttccgcccatgccgttgatatagtttgctaaatcaacgatttcgggttcttttgccacgttttccagcgttgttgttccttcagctagagcggctgccataatcaggttctctgtagctcctacacttgggaagtccagataaatttttgcgccttgcagtcggccttttacttcagcttcaatgaagccattaccgactttgatttctgcgcccattgcttcaaaaccttttaaatgctgatcaatcggtctggaaccaattgcgcatccgcccggaagtgcaactcttgcatgacctgtacgcgcaagaagcggccccatgacaagcacagacgcacgcattttacgaacatattcaaaaggtgcttcagtttgcaaagcgtatgaagcatttacagtcacttcattattttcaaaatgcacatctgctcctaaatgacgcaacacttcgttaattgtatatacatcggagagcgtaggtacatcacaaattacgcttttttcttcacttgctaataaagatgcagcgataacaggtaaaacggcatttttagcgccttcaactttgactgtgccgtttaacttctgaccgccgcggacgatgattttttccaaggtattcccctccgcgtccctaaattctctatattaatattcagtcgtaacgattggtgtgccaaccgtaacggtatgttttccgcccattcctgcacttctaagtgcaatttgcaaattcattttatgtttcgaggtcataatgtactcttcccactcatctgtaaacgcagaaatagaaacgaaatttggctcaactacatgttctactgatcttgcttgaaattcatttaataactgatttgcttttttttgcaaaacaatattcatattatcatctaagtgaccatttagacaagtaaaaataactactttttcttggaatatcccaagtgtctcccgttcaaactgttcatatgtatcattccagctatccggtgtctctagactcatttgctcatataataaatacgaagttggattgtgttttttgagggttgtgacaagctgcagtctaaaagaagatcgattttttttgtcagtatatgtgccaattgcctttatcattttatcttcccgtgcaatcacccaatcatattgacgatactctgattttaaacgttgcactttttgataaaattctttttcggtcagtgacatgttttgttttgcatgcaatgtccacttatctattgacacatcttggcgttccatcccctctgccatttgtgctaacggcgttaattcactcgcatgaatggtatggaaaacagcaatgacgaagcttaacatgacggaaatgataatagcgcggcttacttgttttttcttcatgttcatctctcccccttatccccagttttaccggaggcaagaggcgccatacgtaaaaatcttcgtcaaaactcgagctattcgcttcattcaaaacctattaaaatagatagggaagctgctgtgaataattgagataatctaaaaagaaattggcaacggccgttccaatggcaattgtcagcaaaatcatcaggagtcttgcctgcacgactttgccttttttgattaacggatctatattgacggcttgcaacgcccaccaagtcactgctataaaaatcaggtgaacgacaatgccgattgcagcctgctgtcccaatacactcatctattacactcctttctctgcgttcataccctttcttattatataagaagcacagataaagatgatacattttatacagaacggaataatcacccaaatctagggctaatccccgcttaaagtgcgattcttttacatggtatactttattggaaaggagctggcaaatgtgaatcattctttttttcagcctgaaaagcaatatggtgaggacctgccaatttttgatcaggaatgggaagcaattgcattctattatgattatagacagtcacagattgaagaactgaatgaattgtgtcagttttttaacatttctcttacctatacgagagaaagccttgaagagcttgaaaacctctattttcaaagtatacaagaacttttgcttgctgattggaatcttcctattgaagaattcgagaaaatgatcagtgtttatcttatagattgtgtgattgcccgccatgaagatgctgaatgggttgtaaaaccttatccctataaagacggcgcttatacacttggctttagaagacatcgcaaatcgtggcatacaatgaatgcctgtgatggtttatacctgcgtccaaaagaggatcgcccgctgttatcgctgtttgattctcttgtgcgttcataaaaaaatccttctctttatgagaaggattttttcttatttccctgctacatccaatctgttcaaagcccgctgtaacgcaagctcagcccgacgaatgtcagtatcatctgattgagaattcaaacgctcctgcgcccgctggcgtgcagcttcagcgcgctctttatcgatgccttctgctgtctcggcagcctgggcaaggatggtgacctgatcaggacggacttcgacaaatccgccgctgacggcaaccatttcagtctgcccgtcttttttcagacggacagcgccgattttaagaggagccacggttggaatatggcctggcaaaataccgagatcgccgctttcggctctcacactcaccatttcgatatccgcatcgtatactgggccgtcgggagtaacgatattgactttaacggtcttcatgcttttaccctcctaggaccagattaaacttctacacccatttcttttgctttctcaacaacttcttcgatacggcctacaagacggaatgcatcttctggaagatggtcatatttaccggctaagatttctttgaagccttgtaccgtctcttttacaggcacgtaagatcctttttgtccagtgaactgttcagccacgtggaagttctgagaaaggaagaactggatacggcgtgcgcggtgaacgacaagtttgtcttcctcgcctaattcatccataccgagaatcgcaatgatatcctgaagctctttgtaacgctgaagcgttgactgtacttcacgcgcaactgcataatgctcttccccgacaatttcaggagcaagggcgcgtgatgtagatgccaacggatcaaccgcagggtaaatacccatttcagttaatttacgctcaaggtttgttgtcgcatccaagtgagcgaacgttgtcgccggcgccgggtcagtgtagtcatcggcaggcacgtagatcgcctggatagatgtaactgatccaacgttcgtagacgtgatacgctcttggagctgacccatctcagttgcaagcgtcggctgataaccaaccgctgaaggcatacggccaagaagggctgaaacctctgaacccgcttgtgtgaaacggaaaatgttatcgatgaagaacagtacgtcctgtccttgtacatcacggaagtgctcagccattgtaaggcctgtcaaagcaacacgcatacgtgcgcccggcggctcgttcatttgtccgaataccatggctgttttgttgattacgccagagtcactcatttcgtagaaaaggtcgttcccttcacgagtacgctctcctacgccggcgaatacagagataccgccgtgctcttgcgcgatgttgttgattaattcctggattaatacggttttacctacaccggcaccaccgaacaatccgattttaccgcccttaatgtaaggagcaagcaaatcaacaaccttaatacctgtttcaagaatttcaacttctgttgaaagctgatcgaatgaaggcgcctgtctgtgaatcggatcctttttcgcatccgcaggaaccggctcattcaaatcaatattttctccgagaacgttaaatacacgtccaagtgttacatcaccaaccggtactgagattggcgctcctgtatctacagcttccataccgcgctgaacaccatctgtagatgccattgcgattgtacggactgtatcatcacctaaatgaagagcgacctcaagcgttaaatcaatacctacttcgttttcacttgcagctggctgtgaaattttaatcgcattataaatttcaggcaagtgaccgtcttcaaaacgcacgtcgacgaccggtcctaatacctggctaacgcgtcctttcttcatcgctatccctcctgacaaaatctttctattctaaagcggctgctccgccgacaatttccgtaatttcttgtgtgatggctgcttggcgagcgcggttgtaagaaagcgaaagtgaatcgataagttccttcgcgttgtctgtcgcatttttcatcgccgtcattcttgcagcgtgctcacttgctttactgtcaagaagcgcaccgaagattaagctttctgcatattgaggaagcaaaacctccagaacctcctcttcagatggttcaaattcataagacgccgttctttttccgccgccgctgcccaaatcagataacggcagaagttttttctccgttacttcttgagtaatggcgctgacaaaatggttataaacaaggtgcaattcatcaaacgcaccgtctataaacatttgaatcgtttgacgggcaagatctttaatttctgtaaacgttacttcatccccaagtcctgttaactcggaaatgatcggaatctcccgtttcttaaagaaatcacggcccactcttccgatggcaatcaccgcatactcatccttagactgatgacgttcttgcatggcctgataagcactccgtaaaaccgaactgttaaaagcgccggcaagaccgcggtcagacgtaatgacaaggtatgccgtttttttcacttctctgctgagaagcatcgggtgcttcacgttgccggaaactcttccgacgtttgacacaacctcttggattttatccatatatggcacaaatgattttgcattgttttcagcacgattcagcttagccgcagataccatctgcatggcttttgtaatctgacttgtttttttcgttgacgtgatccttgacttaatatcgcgtaatgaggccaaagatttcaccaccttttctcttcatctgcgtaaaaagagagaaaaagagaacctttttctctcatcagcattcgagttagttgcttggtgcaaatgtgcgtttgaagccttcgattgcagcattgaagtcttcatcagcaggaaggtttcctgttttcgcaattccgtcaagcaggtctttatggttttggtcaaggtacatgtagtactcttcttcaaaacgtctgatatccgccacaggaatatcatcgagatatccttttgtcagcgcataaagaatggctacttgcttttcaaccggaagcggcttgttcagatcctgcttcagcacttcaactgtacgcgcaccgcggttcagttttgcctgagtcgcttggtcgaggtcagaaccgaattgagcgaatgcttccagctcacggtatgacgcaaggtcaagacgcaaagtacctgatacttttttcatcgctttgatttgcgctgagccgccgacacgggatacagacaatccggcattgatcgctggacgtacgcctgagaagaacaaatcagattgcaggaagatctgtccgtcggtgatggaaatgacgttcgtcggaatataagcagagatatctccggcttgtgtttctacgaacggcagagctgtaattgatcctgcgcctttcgcgtcgctaagctttgctgcacgctcaagcagacgggaatgaagatagaatacatccccagggaacgcttcacggcctggcggacggcgaagaagcaaggacagctcacggtaagcggccgcttgtttagaaagatcatcgtatacaacaagaacgtgcttgccgttgtacataaattcttctgccattgtaaccccagcatacggtgccaggtacagaagcggtgccggctgtgaggcagacgccgttacaacaattgtataatcaagcgcgccgtgtttacgcaatgtttctactacgccgcggactgttgattctttttggccgatcgcaacatatacgcagatcatgtcttggtctttttggttcaggatcgcatcgatcgcaacagatgttttacctgtttgacggtcaccgatgatcagctcacgctggccgcggccgattggaatcagtgcatcgatcgctttgataccggtttgaagcggttcatgaacggatttacggtccataacgcctggtgcagggctttcaatcggacgagttttgcttgtaaggatcgggccaagtccgtctaccggttggcctagcgggtttacaatacggccgattaactcttcaccaacaggaacctccatgatgcgacctgttctttttacttcgtctccctcacggatctcactgaaaggtcctaagatgacgatacctacgtttgattcttcaaggttttgagccatacccaaaacaccgtttgaaaattcgacaagttcaccggccatacagttgtcaaggccgtgcacacgtgcaataccgtcaccgacttggatgactgtacctacgtcttgaacttcaatatcagattgataattttgtatttgctgttttatcagcgtgctaatctcttcagctttgatgctcacttaggtttcaccccttctatcgattttccccggctaattgacgttcgatgcgctgaagcttcccgcttacgctgccgtcataaatccggtttccaatgcggactttaatgccgcctattaaatccgtctgcacttcatttctgattctcagtgaagcgactccggctttttttgcaaacacttgtgataatggtaacatttctgcatccgtcagcggtttcactgaatatacgattgcgtcttctgtttgacgggccacatttgcgagtttgataaactcatctgtgagctcagggacaatcgcggcacgatggcggtcaatcaaaagaaaaatcgtattgagtacggactgtgacaaagagccaaatgcattttgaatcagctcttttttcttcgcagccggcaccttcggatggttcaacacatcattaagcgctttttcattttgaaatacttgttttacaacaattagctcttcttctacttgattcagctgagcggactcattggctatatcaaaaagagctgatgcatatcgtttagagacagctgatccactcatcggctttctcctacctctttaagatagtcctggatcaatttctcttgcgcttgttcatccagttctttttcgatcactttcgacgcaatcatgacagaaagagacgctacttgctcacggagagcagaaaccgcctgttccttttccttcacgatttcagttcttgctgcttctttcagacgttcagattctgcacgtgcagcctgaataatctcttctttttgcttctctcccagtttctttgcgttttcgataagagtttgggattcctgtcttgcttcttttaaaagaacgcgctgctcttcaatcagctgctgcgcttctttatttttttcttcagcagacgtaatttctccagcgatgtggtcttcacgctgtttcattatgtttaatagcggccctaaagcgtatttcttcagaagcgctaataagattaacatagctaacagttggaacaggatatctccgccgttaaacgacaatcctagttcaagtggtaattgagacatctactacggcaactcccttctgcaggtttttctttgctgatccagcagccgcacttgtctcttttcagccggcaaggcgggatgcttatcagacataaagcaatggcgaaggttctcttggaatgatcttcgccatttttagttcatataaggcttttatgcttagccaaagaacgctaagaatgcgataacgacagcgataataggaagggcttcaactaatgcgatacccatgaacataagagttctcagttctttacctgcttccggctgacgggcaatcccctctaccgtacgtgaaacaatcaaaccgttaccaatacctgcaccaagtgcgcctaaaccaattgcaatcgcagctgctattaaattcatgaaaaagttcctcctttaaaatgttatccgtttggatataatgttttaatgatcatgactgattttatgagacatgtacaccatcgtcagcattgtaaagataaatgcctggatagcaccaataaataaactgaatgcttgccatgccagcatcggcagaatggcaccgattgtaccgacaagaccgagagccacgctttgcgaataatggcttgttgctaatcccgcaagcaggccgagaagaatctcaccggcgaagatgttaccatacagccgcaaacctagagtcagcgtattcgcaaactcttcgatgattttcatcgggagcatgaatggaacaggtcttaaatagtctttggaatattccttgagccctttcatcttcacaccatagtagtgggttaaagcaacaaccatcacggctagcgttaatgtaatggcaggatcggctgtcggagacttccaccagagctcatgtccgattgtaatagagaacggcagccccagcatattcgacacaaatatgtacatcagcaatgtgacaccaagtgccaagaagttagcccctgtttttaaatccattgtactgccaataatattgcggacgaaatcaacaatccattccataaagttctgggcttttccgggacggatcgaaagcgttcttgtcgtcaatatagcaatcaataaaacaatcacactcgccacagtaatcatcagaatgtttgtcagattaaaagtaagacctagaaattctatagttctgtaaccatgattcaaagggttttcacctctcttccattgatgaacgtttaagctggataaaggaatctatcataatgacagggtatattgtcattaatccaataactgtacttgccatatgaaagtattcgggatttttataggcaacagccacagcaagaatcgcattgcaccaccgcgctgcgctcccgagagatcgtatggactttcctttctcaacagctctgtcaaaagcattcattcttctgacgagcagtaaaaaattaaacaaactgaaaacagttcccagaataaggcctaaaaaaacggttttatacgctgttaaaccataacccagtacatacactgccaaaatgaacaataaatatttgcgttgtctgctaaatgtaagcttgggatcgtccatcaattatctgtctcctgatgaaaaaataatgtatagcttggatacggcaaaaatcagcggttaacccttagtagaagaccttttttgaccggcaaaacgggcctgttcgaaaaaatcattcatccgcaagccttgcagggatgctgtttcattcgcttaaataaatcctcataatacgggtttgctgagaggatttacattgaggatgaggactataatgaaagctatgaaaaccttctcataataccctcgtttagcatacaatagcccctaacatgtgtcaatctgtttaaagttaaaaaactttttatactttacgtctccacagaatgttcacattttcacctataattgtatacagattcaccgaatagcaaaaaactggataaaaaaatgaaacccccttttggggatttcattttttattttgttccaaacatgcgatcacccgcatctccgagacctggaacaatatatcctttttcatttaatttttcatctagcgccgcaatgtaaatatcaacgtccgaatgatgcttctgcaattcttccacaccctccggcgctgctacaagacacatgaaacggatatttttcgcaccgcgttttttaaggctgtgaatggcttcaactgcggaaccgcctgtagcgagcatcgggtcaaccacgatgaattcacgctcttccacatcagaaggaagcttgacatagtattccacgggttttaaggtttctggatcacggtaaaggccgacatgtcccacttttgccgcaggaatcagctttaaaatgccgtcaaccattcccaatcctgctctgaggataggaaccactccgagttttttccctgagatgactttcgatttcgcagcctgaaccggtgtattgatatccacttcttccagaggaagatcgcgggtaatttcaaatgccatgagtgtagccacttcatctactaactctctaaaatccttcgtacctgtattttcattccgtatatatgtcagcttgtgctgaattaaaggatgatcaaatacataaacctttcccatactgtgtttcagctccttttttattgtcccatcaacaattacacacttctattgattctacaaaaaaagacattgagtttcaagaacatcgtcaaaaaacccgccgggcataagccccagcgggttttaggatcttaataatctaattctttatataaaggaaatttatcagtcagagcagctacacgctgtcttgcttcttcaagttttccttcgtcttcgtggtttttcaatgcaagcgcaatgatagcaccgacttcttctaatgcgtctccgtcaaaaccacggctggttacagcagctgtcccaagacggatgccgcttgttacgaaaggtttttcaggatcatatggaatcgcgtttttgttagacgtaataccgatttcatcaagtacatgctccgcaaccttaccagtcagtccgagcgaacgaagatcaacaaggataaggtggttgtctgttccgcctgaaacgagctggatgccctctttcgttaaggcttcagccagacgtttcgcgtttgaaatgacgttttgtgcatatgttttgaaatcgtcctgcaatacttcaccgaatgaaacagcttttgcggcaataacgtgcatcagagggccgccttgaattccagggaagatcgatttatcaattttcttgccaaactcttcacggcaaaggatcataccgcctcgaggaccgcgaagtgttttatgtgttgttgttgtaacgaaatcagcgtaaggaaccgggtttggatgaaggcctgccgcaacaagtcctgcgatatgtgccatatccaccatgaagtaagcgccgacttcatcagcaatttcacggaatttcttaaagtcgattgtacgaggatacgcacttgctcctgctacgataagcttcggtttatgagcgagggctttttcacgcacgtcatcgtaatcaatatattgagtttctttatctacgccgtactcaacaaagttatattgaacaccgctgaagttgactgggcttccgtgtgttaaatggccgccgtgggagaggttcatcccaagtacagtatcgccttgctccaaaatcgtgaagtacactgccatgtttgcttgtgcgcctgaatgaggctgaacgtttacatgctccgctccaaagatttccttcgcgcggtcacgggcgatatcttcaacgacatcgacgtgctcgcatccgccgtagtagcgtttgcccggatatccttctgcgtacttatttgtcaaaacagatccttgtgcttccataactgcttcacttacaaagttctcagaagcaatcaattcgatcttagtctgttggcgttcacgctcatttttaatggcgttaaacacttgttcgtcttgcgcaggtaaatgtttcatcagcgagatcctctcctatccgtatcctgttctttgtttttaccatcactattgtacatggtttttaaggccgatgtaaaagattatttttaaaaaatctaaatttttattggtaaaaacgaatattaataacttaaatttaatttaaagttcggaatttatttcactgtcttaaaataaaagaaaagactggctatgcagtcctttcattcacactcataaaccgcccgcactccgccgattagtttcggccgtgtacgcgccaatgtcacatgagctgaaccgaggctgttttgagagacacgcatagggacagccaccggcttcagatgcatgccgataaacgtatcgcctatatcaattccggcgtcagcctgaatggtttcaacaagaacaggagacttcatctgcttaaacgcataagacgccatcgctccgcccgcttttggaacgggcacggcagaaacggttggaagcctgaacagcttggctgtttctgcttcgacgacaagcgctctgtttaaatgctcgcagcattgaaacgccagatggattcccgttttttcccggagctcagcaagtccgctgtagatgctttcagcgatatctacactgcccgatgtgccgatccggctgccggccacttcgctcgtgctgcatccaaggacgaagagctgatcttgtttcaattccgcttggtcctgaaactcagacagcatcgtcttccacgtttgtttcaactcattcattaaacagcacccctacaggtttttctcttcataatcggagatttttccaatacgcgtttggtgtcttcccccggtaaactcagtagtcagccagatttttgcgatttcccgagccaaaccaggtccgatcacccgttcacccatcgcaaggatgtttgtgtcattatgctccctcgtcgccttcgcgctgaaggtatcgtgcgccagcgcgcagcgaatcccttttactttattagcggaaatgctcatgccgatgcctgtcccgcaaattaaaatgcctctgtcaacttcgccgctaaccactttttcggccaccggaaaagcataatccggataatcgacagagccgctgccgcagtcacagcccatatcaatatattcaatttgcaattcgtccattaactctttgatttcatttcgaatgtgaacgccgccatgatccgatgcaatggctactttcatctgcttttcctcccagcgtgtgtgatgcggcccgcccgctttattgaccgcgcagcctgtccgctctttgattcacaccatatgatgtgcttttcactatattctactccttcacgcaggatttgcaaatgacctgtttgcagattttctgacaacttatctacggtcttttttcagctgttttgccagctgccgaagaagctcttcaagctcatctcgcgtttgtttatagatgtcaattgagccgccgaacggatcgaggacatcaccatggctgcctgtgacatattcttttaacgtaaacactttatcacgataacgtccaaattggctggcaatgatctgtttgtgctgatgggtcatagccagaaccaaatcagccgattccataagttcttcagttaatggagaagacacatgattaagggcaatgtgtttttcaaacaacgcttcgactgcatgaggcgtcgctttcccattaggtgaagcaaacacacctgccgagcggacattgacattcagcccttccatttctgcaattgatttaaaaagcgcctcagccattgggctgcggcacgtatttccagtacagacaaaaataatatccatgtcagtcaccccttatttttctctattatatatgaagaaaaaagaaacggcgacttcgtttcttttattggtatattaaattggcaaaagcagctttaatccaaacacgattaatatgatgcccccgagcgcttcgctgtatgtgccaagccatgactgcacttgttttccgaccagcaggcccagccatgtcaacatcatgctgaacagcccgaacagggtaattgtgaggagcggatgcgagccgtatatccccaagctcaagccgacggaaaagctgtcaaggctgacgccgatggcaaacagcaataagcccggccctgccggtgacatgaatcgttcttctgactgtttaaaagaggccataagcatttgaaccccaagaacaaaaagcagcgccccaccgatataaaccgctaacacgccgaggagccctgacagcatgttaccggccgccatccctgcgagaggcatgatgacgtgaaagaggccgatgatgaaaccaatatagaatatctgcttctttctaagtttgaccatgcccattccaaggccgacagaaaaagcatccatccctaaagcaaacgccatgatgcttaatgtaatcagttcgcctataaacaaatccgacatacataaataacccccttggacacgccccgcttttttagcctatgcgtgtccaaaaagggttagaacatctgactgctttcagcgaatcactcttcctccggcggctttcatcagcctgttcataatagcaagaccgacacctgtatccggaaaggattccgctataatgaaatccaccttattctcatcaaagctgcgcaaagcatcatacagccctgccgcaacagtctcaagctgagcccgtcttccgcagctcttcacataatcagcggaataaacgcccgcgttttcttctgtcgtcaggacaccgacccgtcttccgccctgttgatattcttgaatgaggtgctgaatgcgctctgggctgccttcgcaaatggcaagaggcgctgtcggcgcataatgtgtatatttcatccctggagaaatcggcttctcgttttgatcgctgagccctttatccacatggatcggcccgatcacggcctcaatttgttccttcgtaatgccgcccggacgcaggagaacagggatgtcgtccgcacatgaaagcacagttgattcgaccccgattccggtagggcctccatccataataccggctatgcggccatccaagtcgtgagccacatgctccgcttttgtgggacttggcttgcctgatagattggcgctcggtgctgcaatcggcagtcccgattcgcgaatcaatgcaagggcaagcggatgatccggcattctaatggcaaccgtttcaagacctgccgttacacgaggtgaaagcgcatcaggtttgcaaggcagaatgagcgtaagtgctcccggccaaaaccgtttcatcaatgttttcgccttttccggcgccgggcccgttaaatcctcaagctggctgatatccgcaatgtggacaatcaggggattatcgctcggccgccctttcgcctcatatatttttttgacagcatccgtattttttgcgtttgcgcctaggccatatactgtttctgtcggaaaggcaacgacctcattttctcggagcaaagcggctgcttgtgcaatttgtggatcatttgtggataactcgtcagttacatccacaaaccatcttttcgttttcatttctgaccaaactccttattcacaacaataaaacgattgttttacgcgtgtaatccttttgaaagtataaaagatgtcctgtaataaaacaagcgttatccacaaattgtggacaacgctaataaagaagtggataagtatgtgtataaactgcacttatccagacgcttttttcatcaaaacggccccttctgtttgccgcgattcacagaagtgatcagaagaaaacagctcctccggtacactttcagctctttcaaaacccatggccgtcagaaagtccgcagaggaatgctgattcgctactaggtacacggttttgatctgatgcttttcgcacagcacctccatgctttgaaaaagcgtgacgatgtggccttggtgaagcttgtccgatatgacaagtgatcgcagcagcccctggtcacagctgattttttcaataccgaggcatccggcaatgtttttctcactgtcctccagcataagaaattgagtgaagccttctttcacgccttcatagctggttttcgcctgttttaaaaattcctcgagcacatctccgtctttttcccttgccacccgcagttgataaaacatccgttcaccccgtttttgcgttctttcttccaatctatgaggcaaatctatttttagaccagatgattaggaaaaaaggtcggaaatccattcgactaaaaagaatttcacttctgtgccgtcttctttttcttcattctcttcttttttggctttttccgctttagcggttacgtcctcaagcactttttcagtctgcttttttgaggcttctttatcttcttgttctttgacggcttccccgttagaaaaatcgagaaagcagaggggcgggaacagcacacaccaccagttggcgccgtctccgtttccaagcgtaatcaaaatcgcttcatactcaccggcaggatataccatgttgccgtaaagctttgtcggaaacgagattttgtcaaaatcaacggatatcgactgattcgctccttctttctccattgtttcctttgcaattgctttgatttcaggcagctttgaacgaatcacgcgacgcgcttcttcaatagaagtaatatcctttacccaagttgtgatttctttattcaccgcgtctcttatatgacgttttaattgctggtcttgatcactatcgctgtttgccaatattctcaaacgaatcgcctgatccggtatgaccaccggctgattttccgatttctgtgccgtctcttcttttgccagccctacgagcgctccagataataaaagaaagatatatatacaaatgattactgtttttttcatcggtccccaccgttcctctccgtgctttgtttctagccctattatggacaaggagagccgggggtaaacgtgcagggtgaaaaaaatctagcaagctgttaatcttatttatggtacgatagtgttttaggaggtttaagatgaaatacaattatacagtgctgttatcagcattcacgatgtccgttctttattcagtaatttatattcattcatttatcattgccgctctcatcacaatggcattttattttctgtttccttatttgatcttcgcactgccgcttcaaatcatgatgaataaaaagccgaaacggttcagccctttgtatctgctgtattaccttatcgctgcttttattgccaacgcgatcattttcggcgtgcttcagccttcgggacaatctttgtttcaaaatacagccttttatcttttcgctgtattaacagctcttatctattggatatgggattctgttttactgcaaaaaaaggaagcctaagaggcttccttttttattaaaacaaaatcgtcagcaaataacatagaatggaaggtatcgccgcaacaaagaaagcggccgccattttcatgcgagatgtacggccttctttggtttcagaatggtagtttgcccgctgatcgcttccgcttacagccaaacccgatgtaatgatcgcgagccccactaaaacgagagacgcaacgccaaaaatcgcttcatatgaaagagcctgcggaaaaatggtgccaatcatgctctcaatcgcaatgagcaggattcctgctgtcagggcctttttcatgtttacatcccctttgctggtgttaaacagcttgatccattcactcgccagcaagctgcttatttatttttatgaatcagagcgcatatggttctgtcttttccattaatatctttcagcacttccacttccgcccccttaaacgccttgaggatcaggtctttgaccgccgctccctgtttccagccgatttcaaaaacgacaaatactttatccttcataacaagcggaatgtcttccataaaccgcttataaaatttcagcccgtctccgccatcggtgagtgcgtgcagcggctcatgaaaacggacaatttccgataaatcagccatttcttcctctgaaatatatggcgggtttgagacaatgatatccgctttttttcccgccttaataaaaggctcaagcagatcgccctgataaaagcgcacattcgctccgagtttttctgcattggcagaggcgacttgcagcgcctctttcgaaatatcgaccgccgacacagaaaagctttggttttcaagcgcaagcgtgacggctattgcgccgctccctgtaccaacgtcaacaacttcaagcttgccgtcttcagaaaagacactccgatatttttcaagcaaatgaaagacaacttcttcagtttccggccgcgggatcagcacatcatcattcaccataaattcccgtccataaaaaaactcttttcctataatgtattgaaccggcacgccctctttatgcatctcaacgtgacgcttaaagcgatacagttcgtcttcaccaatcggttcctgtaagcttgcgagcagtttgcttctctccattccggtatcataaagcaataggagctcggcagcattttcttctcttcccgcttcggttaaataagaagaagcccatttcagggcttcgaatatcgtcttcatcttaaccttccgactgctgaagcttgcttgcctgatcttcaacaatcagcgcttcaaccacttcgtcaagttttccttcaagaatctgatcaagcttttgaatcgtcaaaccgattctgtgatccgtcacacggttttgcgggaagttgtatgtgcggatacgttcagagcggtcaccagatccgactgctgatttccgtgtttgatcatattcagcctgggcttcctgctgaaatttatcatagattctggcacggagaaccttcattgctttttctttgttcttaatttgagatttttcatcctggcatgatacaactacacctgtcggcaagtgagtcagacgaaccgcagacattgttgtgttaacgctttgtccgcccggtccgcttgaagcaaacgtatcgacacggatatccttctcatggatgtcaacctctacctcttctgcctcaggaagacatgctactgttgcagtggatgtatggatgcgtccgcctgattctgtttccggaacacgctgtacgcggtgggcgccgttttcatatttgagtttagaatacgcgccgcttcccgtaatcataaagatgatctctttgtagccgcccgttccggttacattcgcttccatgacctctgttttccagccctgaagctcagcataacgggaatacattctgtacaggttgcccgcgaataaagcggcttcctcgcctcccgcagccccgcggatctccataataacgtttttgtcgtcattaggatctttcgggatcaggagcaccttcaggcgttctgacagtgtttccgtttccttctgaagttcagaaatctcttccttcaccatgtcgcgcatctcagcatccagcttctcttcaagcatcgcttttgcatcagccagctgttctgacgcatctctgtattgtctatatacgtcaactgtttcttgtatatcagattgctcttttgaatattctcttagctttttcggatcgttgactacttctggatcgctcaaaagctcatttaatttctcgtatcgttcttcaattgattttaaacggtctaacacggtcttcacctctgttttcctgtgcgtaacattctcattatagtatagtgattaaccccagtcaaaagcatttcaatcccagctttaaaagcctcctctgctatactgggaatcgaggagggatattgttgctgaaatccatacatcatattgcaatcatatgttcagattacgaaaagtcgaaagctttctacgtacataagcttggttttcaggtgattcaagaaacgtaccgcgaagagcgcagctcctataagcttgatttgtcgcttaacggctcgtatgtcattgagctgttctcgtttcccgatccgcccgaacgacaaacccggcctgaagccgcaggcctgcgccacctcgcctttacagtcggtagcttggataaagcggttcaggagcttcatgaaaaaggaatcgaaacagagccaatcagaacagacccgctgaccggcaaacgtttcaccttcttttttgatcctgaccagcttccattagaactgtatgaacaataacagtttttgaagaaaaaaaggagatacccactttctttgccgaatcttttcttgttttgtctaacgggaagggaacctcattctatggtcgaatacctagcttaaaaggaggtatgggatcatgaatacaaatatggtagcaagtgaactcggcgtctccgcaaaaacggtgcagcggtgggtgaagcagctgaatctaccggccgaacgcaatgagctcggacactattcgttcacggcagaagacgtgaaggttctaaaatccgttcaaaaacaaatctctgaaggcacggcgattcaggatattcatctgccgaaaagcgctaaaaagcgcacaggcttccttgtccaaaaaacaaatagcgacacagaacgaagaatcgagcagcttgaacaaaagctggacacccttttacagcaaaggcaggacgaaagtgaattgatggcaagaatgtcggaactggaacgccagctgaaacaaaaagccgatgaaggtgtatcttaccagctgcttcagcaccgcagagaaatcgatgatattcttgcagatctgcaatcactgacctcacaaatgaaagaattcaccgctcagccgatccccgagactgctgctgcttctgaaaaaaccaaaacaagaaaaaaaccgctgctgtcactgttcaaatttcaaacctaaagcaaaaagctccccgtaaagggagctttttttgttacgcagtaagcgcgataatgattggaagtgaaatcaatgacagaatcgcactgaccacaaacgcagttgcagtttcttcttcttgtttctcgaaacgagtcgcaatcatggctgcaacggcagaaccagggaatgcaacaagaaggattgcttttgttgtttggtcagccggaagtccgatagcaagagcaatcaggaacattaatgcaggctgaaccgcaacttttagtaacgcaataccgatagccggcatactgagtttaattttacgaataccaacggtaacaccgacagcaaagagagcaacaccagatgttgtgcttccaagctgatcaagcattttaacacccagctcaggaagagtgaaattgaaaaccagcaccaagatcatactgattaacggagcagctgcaagcggctcacaaagaccatgcaggattgattttcctgtcatcttccagaagctgtcgccactctcttcgtttttcttagaagactcaccaacagtagcgataatgatcgcgagcggatcaagaatcgcgttaaccacgatacctgtgaccgcgatcggaatcgcaacttcattcgctccgaataagcttcccaataccgggatacccataaatgcgaatgtcggctgtgcagagttcaaagaaaatacagatgagttcgttaaatcatacttgaaaataaatctgcaaaccaaaagaatgatgatatagaaaccaacaatcccaataattaaagaaatcattaaaggtacttgtgataaaaattcacttctggaagttgtcaaaataccagcgataaagtgagctggaagtgcgtatttcgttactaacgtacttaccccttttgccgacttggcatcataacttccaaaatgtcctgcaaaccaccccagcacgataacaaagaagatcggcgccaggaggattaagatatctaagatgctcaaaatattctcctccaaatcctatgtccgtatactttagctttacaaaaagctttccctcggacagaaaaatttactcgctaattatttcgcgatgacttttttgtattcaggtgtccacattgcttcaagtaccgcttgtttcacatcttcaggctgacgatttgccacgccgtctttaattgctgcttcagcaacggcaatcgcaacttggatagaaacctcttgaagcttatcaatgcttggaagcaatcctgctccaggtgtttcaagatcaaccatttcagcaatcgcatcagcagttgctgcaaacatagcaggtgtaatgatacgcgcttcagctacaattgaaccaagtccaagaccagggaacgcgaatgcgttgttagattgtccgatttcataagaaacaccgttgtattctacattgtcaaatgggcttcctgttgcaataagcacttttccgtcagtccatttgaacagatcttcaggaacagcttcagcaaggtgagtcgggttagacatcggcatgataaccggacggtctacgtgagatgccatttcttttacaatttcctctgtgaatgcacctgaaacccctgaagtaccaatcaagattgttggtttcgcttgacgaacgacttcatcgaatggaatttgacctttttcatcgcgcttccagtctttcacttcatccgcattgcgaaggtaaggtttttggaaatcaaggatgccttcgatgtcttcagtcagcaagcctctgtaatcaagtgtgtagaaacgtttgttagcttcttcttcagataatccggctagcaccattgtgtcacggatttggtcagcaataccgataccagcagaaccagcaccgaagataacaacacgctgatctttaatagaagcgccggttttcttcatagcggcaagcacacctgcaagtgtaatcgcgccagtaccttgaatatcatcattaaatgtcaggatttcatgattgtattttttcatgatgttgcgtgcatttttgttgccaaggtcttcccagtgaagaagcgctttagggaagaatttcaatgcagcttttacataagcgtcaatgaaagcttcgtagcgttcaccttgaacacgttcatgcttgttaccaatatataaaggatcgtttagaagtttttcgttgttcgtaccgacatcaagcacaaccgggataacacggctagggtcaataccagctgcagcagtgtaaacagctaatttaccgattgcgatattaataccgcctacaccccagtcaccgataccgagaatgctttcagagtcagtagcaacgataagatcaatatcgcctgctgtcgcgtgaaggttttcaaacgctttttcaataccgtcaatgttgtcgattgacaagtagattccttgaggtcttctatattcatggctgtactcctgaatcgcttcaccaactgttggtgtgtacacaacaggaagcatttcgcgaagatggtttttcagcaatttatagaaaagaacttcgttacggtttgcaagatcacttaagtaaacattttgacgaaggcggtcaggctgcgcttggaattgctcgtacgcgcgttgtgcttgttgatcaagagaaagtacagttggcggcagaagcccttctaagccgagttcttgtctttcttctagtgaaaaagcaacgcctttatttaaagtaggaatagataaaacttcttttcctctaagagttgtttctaagtggccttctttcgttttttttatgttattcaagcaaatctccttctttcttgaaatagttaaccaagttaagtaataacccatctaaaatatgaccgatcatgatctttatgcgactttgtgacaattattcgaacaatgtctcaaaactatttacattacgtaagctattgtatgcctgtcaaaatcaaaattcaagggaagaaaattacttaattttttaatatacttatttaaattttttaattgcatattatcagaatataaaaaaaacaccggtgtttttagccggtgcattctatctttatacccatgttttggactattttttagatttacctgggacttcgtgatgatgtctgcatcttgcttcatatgattcagatgcaccaaccaaaatgaccggatcatcgtaagaagcaggtttgccgtcaatgaggcgctgtgttctgctcgccggtgatccgcaaacagaacagacggcttgcagctttgtcacactttccgcaatcgccatgatattcgggacgacaccgaacggctctcccctaaaatccatatcaaggcctgctgctatcacacggtagcctttatcggcaagagatgataaaacctcaacaatttcctgatcaaaaaactgcacttcatcaaccgcaatcacatctgtactttcactgatgtgatcccaaatgtccgcagcagacgaaatggcatagctcgtcatcgatgttccattatgggagacaacagcagcttcgctgtatcggttatcaattacaggcttaaataccctgacttcctgcttggcataagttgctctcttcactcttctgatcagctcttcagatttccccgagaacatgctgccgcaaatcagctcaagccacccgctttgtttcattatgtacataggcttcgctcccctctctctgccagctgtgttttagacaatataaaaaacaggcaagactgctgcttgcctgttgagaaatctattattacttaagaccgtattttttgttaaagcgatcaacacgaccatcagcagaagcgaatttttgacggccagtgtagaatgggtggcattcagagcaaatctcaacgcgtacctcttcttttactgagcctgtttcaaattcatttccgcaagcgcatttaactgttgcttttttgaaattaggatgaattcctgctttcattgtatccatctccttccgccctgaatcccgtgtggaaacagagttattatttcggagcattgtccgaaacgcatatgagaaaattatatcagtgatttacttcttttgcaaatacaatttaccttcttgcagatgatagatttgcctgtttccattcttgattgagaatatcgaaaaattcctggtttgttttggtttttttcatttttctcatgaacttttctgcgaaatcaggtgaatcagacatcgttttgcggatagaccataaacgatcaagatgctctttaggcacaagcagctcttctttgcgcgttcctgaacggcggatatcgatagcagggaagatgcggcgctcggcaagagagcggtcaaggtgaagctccatgttgcctgttcccttgaattcttcataaatgacatcatccatacgtgaacctgtatcgaccagagccgtagcaaggatggttaagctgccgccctcttcgatatttctcgcagccccaaagaagcgtttcggacggtggaacgccgctgggtcaatccccccggaaagcgttcttccacttggcggaatcactaagttgtaggcgcgggcaagacgtgtgatgctgtccatcaggataatgacgtcttttttgtgttccacgagacgcatcgcacgttcaagcacaagctcggccactttgatatggttttccggcacttcatcaaacgttgagctgacgacatccccagctacagagcgctcgatatcggttacttcctcaggtctttcgtcaattaaaagcacgatcagctctgcttcaggctggttcgctgtaatgctgttggcaatttccttcagcaacatcgtttttccggctttcggcggcgcaacaatcaatccgcgctgcccaaatccaaccggcgccatcatgtccataattcttgtagacaagaagttcggctttgtttcaagcaccatttgacgatccggataaagtggcgtaagagccgggaaatgcacacgctcttttgcagattcgggatcatccccatttactgcttcaacgtgcaaaagtccatagtaacgctcattttcttttggcgggcgaaccttgccagatactttgtctccgttccgcaaatcgaaacggcggatttgtgaagctgagatgtaaatgtcttctgagcttggagagtagttgatcggtctcaggaatccgaaaccttcagactggatgatctcgagaacgccttccataaacagcagatcttcctgttctgcattcgctttcagaatggcgaaaatgagttctttttttgtcagtttgctgtaataggagattttataatgtcttgcaagttcataaagctctttcaatttcatattttccaaagaggaaatagatacgtctttcataaaaacaccacgcttttcatagtcaatatcttactctgaacatgtcatctgctgcttttgcacaacatccgccaaagcacattctttttttaacataaaggaacttctatcggtaacacttccacccatgatcggcgcttttgttaaaaggattgtcttaatgagttttgaaggaagcgaggacaaaaacatgagaagatcaatacttatatcgtctgtatgcggtagaaattgaaactttcctagtgcttaaaagaaggtattacgcagtaaaattcgcagcactctttatttttaccttatttcaaaaaattattcaactgaaataaggttttgacacggaattgatagagttgacgcttttctgcaaaagttaaagcgggctcacacccgctttttctgtttgttatggacggattacaagatttggtttctttttcaagctgtgtctgccgtcaacgaaacgaacagtgcccgattttgcacggataactaagctttcagttgtaccgacagagcctttgaattgaactccttttaacagctcgccgtcagtaacccctgtagctgcaaaaatcgcgtcatcacccttcacaaggtcttccatgcgaaggactttgcttaaatcaaggcccattttgtgacagcgagtgatttcttcttcgctttgcggaagaagtttaccaatgatttctccgccgagtgctttcagcgcaacagctgaaagcacaccctcaggagcgccgcctgatccgaacaggatatcaacgcccgtgtggtcgaaagccgtgttgatggcgcctgcgacatcgccgtcattgatcaatttgattctggcgccggcctcacgaagctcggaaatgattttttcgtgtctttcacggtttaaaattgtggcaacgacgtcctcaacgtccttgtttttcgcttttgccaccgctttaaggttgtcaatgacaggtgcttcgatgtcaatgcagcccaccgcttccggaccgactgcgattttttgcatatacatgtcaggagcattcagcagagtgccgtggtctgcgaccgcgatcaccgtcagcgcgttccagccgccgcttgctaagatgtttgtgccttcaagagggtcaactgcgacatccacgcgagggccgtacccgtttccgagtttttccccgatatacagcatcggcgcttcgtccatttccccttcaccgattacaacggtccctttcatcggcactgtatcaaaaacgtctctcattgcacttgttgccgcttcatcagcctcatcttttttcccccggcccatccatcttgctgatgccaatgccgcagcttcggtcacacgtaccaattccattgataaacttctttccatttcaacacgatctcctctcacaagaaaccattatgaattttgaagctgttctatttcttcgtcagtcattctttcccgccaaattgtcgctccaagcccctcaagcttcttctcaaggctgctgtatccgcggtcaatatgctccagtcccgtaatttccgtgacgccatcagccatcagtccggctaccaccaagcaggctccggcacgcagatcactcgccttcacttttgcgccttgaagctcaacaggacctgtgatgatggcagatctgccttctactttcatattggcacccattcgtctcagctcatcaatgtgcttgaatcttgccgagtagatggtgtctgtgacgacactcgtccctttcgcccttgtcaggagcgccgtcatcggctgctgtaaatcagtcggaaaccccgggtatacgagggttttgacgtcaaccggctttaagttcttctgcccgccgacaatgaggagctggtcgtcgcttgtttcgatatgatagcccatttctctcaactttgccgttaacgactctagatgagtgggaatgacgttatcgataatgacttccttgcccattgcagcccctgcaatcataaatgtcccggcttcaattctgtccggaatgatcgtatgcttgcagccgtgcagttccttcacgccgtcgattcgaatcacattggtgcccgcacctttgattttggcgcccatgctggtaagcaatgtcgcgacgtcaatgatctcaggctccttggcagcgttttcgatgatcgttttcccttctgccaaaacagcggcgagcataatgttaatcgttgccccaacgcttacgacatctaaataaatccgtgcgcctctcagcctttcagctcgcaaataaatggcgccttgttcattggttacttcagctccgagtgcttcaaagcctttgatatgctgatcaatcggacggggccctaagtgacagccgccaggcaatccaatgaccgcctgcttgaagcggccgagcatcgcccccattaaataatatgacgcgcgaagcttttttactttcccgttaggaagcggcatgctgatcatcgacgtagggtcaacaaccatttccccattctcaaaatgcacgtggccgccgatttcctttaacaggtcacgcagcgtttcaatatctgaaatctctggaagcccttcaattgtcacctcggaatttgccaaaatggttgcaggtattaacgcaacagcgctgtttttagcgccgctgatatgtactgtaccgtttaacgagtcaccgccggcaatattcaacttttccatgatagtctccttccataagaagatagctgcggagctaaataaaatgtcattttattctgtctctgcaaataaagctcatgtccaaaatctagccaattcgaagagaaagaatacaacacattgtaaaatatcaggaagaaaatagcgaagctttggggggtacaggtttcaaaagatgcacagagacccgccggctcgagagacatcgtcgtcatccggcaaaagcagtacgcatacccttcattccgatatcagcttctgcagcccaatgattccttctctgtaaagcggcgtcagcatctgaagatccgctgtatcaggtcggtgaaatacaaaggccgcggcaaacaggcataaagctgtttgccgcccctttcattatttgttccagtctgccaggaattgttcgattcctttgtctgttaacgggtgtttagtgagcgcatgaatgactttcagcggcattgtgccgatatgagcccctctaagagcagcttctgtcacgtgctgcggatggcggattgacgctgcaatgatttgcgtgtcaaggccgtgaatgtcaaaaatctgtttaacttctgaaatcaggtcaagcccgttgtggccgatgtcatctaaacgtcccaggaatggagatacatatgttgcccccgctctggcagcaagaagcgcctggttggcattgaagatcaatgtaacgtttgttttgatgcctaagtcagtaagtgctcttaccgcttttaaaccgtcagacgtcatcgggattttcaccgtaatgttcggagcgatcttcgccagttcttttccttcctcgatcatttcctcagctttcaaagaaataacctctgcgcttacagaccctttcacgacgtctgtgatctcgcgaagacggtcgtggaatgatacgttagcttcctttgctactaaactaggattcgtcgttacaccggcgagaattcctaattcattcgcttctctaatttcatcgatattggctgtatcaacaaagaataacattttcaaaaagcctccctgattaagaaattttctgaactgtgaatatgattgcgctttctaaagatagacggaaaaccgcctgtcaagctgtcaggcggctataaaaagttccaattgaattaagcttggtttgaagaaccaaattcacgcattttaccgataactgtttctttgatcgcttcacgagctggtccaaggtatttacgtggatcgtactcgtcaggcttagctgccaatgtttcgcgaacagcttttgcagaagaaatttggttttcagtattcacgttgattttagctgtaccaagtgaaattgattttttgatgtcagcagtcggaattccagtaccgccgtgaagaactagcggaagaccagttgattttccgatctcttccatttctttgaagccaaggtttggctcacctttgtaagggccgtgaacagaacctaatgcaggtgcaaggcagtcgatgccagtgcgctcaacaagctcttggcactctttaggatcagcgtagattacgccttcagcgataacgtcatcttcttgtccgcctactgttccaagctcagcttctacagatactccgtggaaatgagcaagctcaacaactttagcagttgttgctacgttttcttcaaatggatggtgagaagcgtcgatcattacagatgtgaaacctgcatgaatcgctttcgcacaagattcaaagcttgaaccatggtctaagtgaatcgcaacaggaactgtcactttgtactcttccataagtgcttttaccatagcaacgactgttttgaagccgcccatgtagcgtcccgcaccttcggaaacaccaaggatcactggagatttttcttcttcagctgcttgtaaaatcgcttgagtaaactcaaggttgtttaagttaaattgtcctacagcgtaccctttttctttagctgtattcaacatttccgtcatagaaactaaaggcatgtcgaatgtcctccttatgtagcctgattgtcttctagcgaaaaaagctttccaccctagcatgacccatatattgctgtcatatgtaaatactcagatcgctttttctccataactaggataccaacttttcgacaaatcggcaacataatgacatgattcatttgtttcttctttttgtcagttagacttcaggggcagatattttttgacggcgtctctgatttcgtcgatgtcaaacggcttggcgaagtgcgtcagagcgcccaattccttcgattcctggatcatgtcgagctctccgtatgccgtcatgataatgacccggatgttttcgtcaatgaccttcatccgttttaagatttcgattccgtccatgccgggaattttcatgtccaaaagcacaaggtcgggccgttcttttgtcacaatgtcaagcgcctgcaggccgttcgcagcctgaaacgtctggtagccttctttattgaacacttcatttagcaaaatacgaatgccgtattgatcatcaacgattaaaattttttcattcatcattttacaccccaatattatgattttcgtcaaaagtaagcagtattgtatgtattctgtttgattttcctatttcctttaattataatagtctactttacgacattttctgagcattttctcttttgttgtatactgatattgtacgttataaaggaggattcacttatgttgaaaatattcacgacgcagttaacaggtattttttcccgcattcaggataaggaatctgacgcgattgaagatggggcgcggctgcttgctcaagcggtgatcagcgggcattccatttatttatacggagcaaatgagctgcagggcgtcttttttgaggccactgaaagcaaagaacccttcccatctgtcaaagcctttccagaaagcgctgaggaagtgacagaaagcgacagggtgctgatgttttgctcagggacgggcacagccgaagaacaggcgctctcaaaagagctttatgaaaaaggtgcgggagtcgtatgcgtatcgcccgcagccaaagacagtgcgggaatagaacagtattgtgatgtgcatattgattctaaactaaaaatgccgcttgttccggatgaagacggcacccgttacgggtttccctctttaatgacagcactgtatgtctatcacgctttatcgtttacactaaaagaaattctgcaagagtatgcataatatcttattgtacatgctggaacttgccggaaacaaataaaaaagacttgcccgcttttgacaaacggcaagtcttttttattacttctgatttgcagcttcgacagacgctccgataaagcctttgaatagaggctgaggtcttgtcggtcttgacttgaactctgggtggaactgagaagccacgaaccaagggtggtctttcagctcgatgatttcaacaaggcgtccatcagggcttgtgcctgagaatacaaagccttgctcttccatttgctgtctgaattcattgttaaactcatagcggtggcggtggcgctcgtacaccacttcatcctgatacacttcaaaggctttcgtgccttcttcaagcttacaagggtaaaggccgagacgaagcgttcccccgagatcctccacatccttttgttcaggaagaagatcaatgatcgggtattgagttgacggatcaatttccgctgagtgggcgccttttaagcccaatacgtttcgtgcgtattcaatagacgccacctgcatgcccaagcaaatgcccaagaacggaatgttgttttcgcgcgcgtattttgtcgcgacgattttaccttcaacaccgcggtctccgaatccgcccggcacaatgatgccgtctgttccgcttgtgagttctgcgatattgttttctgtcacttcttccgcgttgatccatttcacttttacatctgcgtcaaacgcatagcccgcatggcggagagactcgacaacagaaatgtatgcgtcaggaagctcaacgtatttgccgacaaggccgattgtaatcgtttgagacaggttgctgactttgttaacaagctctttccattcggacatttccgcttctttgcatgccaatttcatgtgctcgcaaacaagcttatcaagcccttgtttttgaagctccagcggaatggagtaaaggttgtccgcatcttcacattcaataaccgcttttgtatcgatgtcgcagaatagcgcgattttatctttcatatcttgagaaatcggcatttctgtacgaacgacgatgatgtttggctgaatgcccaagctgcgcaattcttttacgctgtgctgtgtcggttttgtttttaattcgccagcagctttaatgtaaggtacgagcgtacagtggatgtacattacgttttcacggccgatgtcgctcttcatttggcggatcgcttcaaggaatggcagtgattcgatgtctccgacagtaccgccgatttctgtaatgacaacatctgcgtttgtctctttccctgcgcggtaaacacggtctttcaattcgtttgtgatgtgcggaatgacctgtacggttccgccaaggtaatctccgcggcgttcttttttaagaactgttgaatagattttacctgttgtcacgttgctgaatttattcaggttaatgtcgataaaacgctcatagtgaccaaggtccaagtctgtttcagcgccgtcatccgttacgaatacttcaccgtgctggtacgggctcattgttcccgggtcaacgttgatgtatggatcgaatttttgaatcgtcacgttcagtccgcggtttttcagcaaacgccctaatgaagctgctacaataccctttccaagtgaggatacaactcccccggttacaaaaatatatttcgtcatttcgtttgctcctctcttcgctcttagctacatttttaaaatgtactattttataaaaaatcatttagccttttaaatgatttataagaaaaatgaggggtgaaaataagaaagctccctttcaatttcttgaaagggagcataacgtactatgttctctcttcgtttttgaagagcccaaaatacatactacctagttcgactatgaaagtcaagatcgttttgaagatgaaatctgatactatttaatttcctcttcttcatcatcatagtcttcatcatcttcatcaataatatcttcttcgatctcaagatcatcgtcgtcttcatcaagatcttcttcgtcaaaatcgtcggcttcaagatcgagttcttcctcaacttcatccaaatcaaggtcgtcttcgtcgatctcttcaaactcgtcaagatcaagatcttcttcgactgctttcttcgcttttttctttttcgccttgactgtcggctgagtttcttcatcaagctgatcatacggataccagctgcgaagcccccacgtctggtcagaaagcgccaggaagcggccgtcaatgtttaaatctgtataaaattgagcaatgcggtctccaagctcttcttttttcacgccgagcaaagatgcgatttcatttaaaagctcctgaaaaggaactggttttttatgttcttcaaataattcgtgagcgatttcaactaaagccatttcctttagctcttcctgtgaatattgtttgatacccaaggtcggacactccctttctattacttatatgtatctgttttatcaataatgaaagcgattttgtatcgttcttatacaaaccatacctctcattataaacaaaataaaacagaatatgctacccttaacagcgttaatttaaataattttacaagagtgatccgactgagagatgttttccgttaatccgcgagcattctggagatgaccagtctttgaatttcttgagtgccttcatagatttgcgtgatttttgcatcacgcatatagcgttctaccggataatcttttgtatagccgtagccgccgaaaatctgcactgcttcggtcgttaccttcatcgccgtatctccagccatcagtttggacatggcggaagcttttccatatgggaggcccgatgattctaaccacgcagcctgataggtcaatagccttgaagcttctatcattgtcgccatatccgcgagtttaaaagcgacgccctgctgctcggcgatcgattttccgaattgctttcgctcttttgcatattgaagcgccgcatcaagcgctccttgggcgatgcctacggcttgtgcagctatgccgtttctgcctccgtcaagcgtcttcatcgcgattttgaagccttctccttcttctccgagacgctttgatgcgggcactacacaatcttcgaacatgatttccgttgtcggtgaagaacggatgcccagcttcttttctttcttgcctgtaaaaaatccttcaaaatccttttctactataaaagcggtaatgccttttttctttttctcgggatcggtgacggcaaaaacaatgtaaatatcagcaacgccgccgtttgtgataaacactttggaaccatttaacacatagtcatcgccgattcgttcagcagttgttttcatgctgccggcgtcagagccagaccctgcttcggtcaaagcgaatgcgccgattttctctccgagggccagctgtgttaagtactctgtcttctgttcctctgtcccaaaggcaaacagcggccagctgcaaagagagatatgggcggaaagcgtcacaccggtggaggcgcacacttttgacagctcctccaccgcgataacgtaggccaaatagtcacttccgattccgccgtaatcttcaggccacggaattcccgtcagccccagatttgccatttcccgaaacaactcgcgatcgaagcgttcttgttcgtcccgttctgccgctgtcggggccacctcatgcttcgcaaaatcgcgcaccaattttcgtatcatctggtgttcttctgataatgaaaaattcattgcttctcccccattttcagatcagcgcctaaaacggattgagccagaagctcgacgacatcgtacgttttgacttggtcttcggcttccttcgcctttgtgccgtccccaagcatcgtgagacaatacggacagccagaactgatcaccgatgggttgactgcgagcgcttgctctgtcctggcgacgttaatcctgttgcctgtttcttcctccatccacattaatcccccgccggctccgcagcacatgccggtttcccggtttctctccatttcaacaagctgcacgcccggaatggctttcaaaatctctctcggcggatcatagacttcattgtaccggcccaaatagcacgaatcatggaaggtaatcgtctcatgaagcgggtgctgcggtcttaattttccgtttttcacaagctcggccagcacttctgtatgatgataaacctcgccttcaaatccgaaatccggatattcgtttttaaataaattgtatgcatggggatcgatcgtaacgatttttttgacatcatttttttcaaattcagaaatattcttctcagccagctcttggaacaaaaattcatttccgaggcggcgcggcgtgtctcctgaatttttttctttattgccgaggatcgcgaaggacacgcccgcgtgattgagcagcttggcaaaggaaattgcgattttctggcttctgttgtcgtaagaccccatggagcctacccagaaaaggtactcaaattcttttccttcttttttcatttcttttacagtcggaatctcagcatccggcgcctcgtcacgccaattttcacgttccttgcggttgagtccccacggattcccttgccgctcaatacttgtcattgcgcgctgggcgtcactgtccatttttccttctgtcagtacgaggtagcggcggaggtcgatgattttatccacgtgctcattcatgaccgggcattgatcctcacagtttcggcaagtggtgcatgcccaaatttcttcctctgtgatgacgtcgccgatcaagcttggattgtaatcaagcgccgctgcggcttcctgcgatccgctgcccgctgacgaagcagccagctgattgcctctcgtatgccgaaacgctgctgcgggcacccatggggagcgcgaggtgacggcagcgcctttttccgtgagatggtctctgagacgcaaaatcaagtccatcggagaaagcatttttccggtgcctgttgcaggacacatatttgtacagcggccgcactcgacacacgcgtacagatcaagcagctgagaccgtctgaaatcctcaatttttcccgctccgtagctttctttcgtttcgtcggtaaaatcaattttttcaagttttccggcagattccattcgattgaaaaagacgtttgccgggccggcgattaaatgggcatgcttcgactgaggcacgtacactaaaaagctaagcaagaacagaagatggatccaccatgcgatatagaaaatcaccgccgcgcctgttttcccgacaccgctaagcataaacgcaatacctgaggcaattggctcgctccaagaaagcccatgctcatgccaaatcagattcatcccgttcccaagcagaacggtcagcattaatcctccgataaaaatgagaacgagtccggctttgaaaccgcgtttcagcctcacgagcttttcgatataacgtctgtagaatgcccacccaacagcaattaaaatgagaaacgtaacaatttcctgaaaaaaggtgaaggcgggatagaccgggccaagcggcagattccggccgggagccagtcctttgatgataaagtcaattgctccgaactgaaccaatataaatccgtagaaaaacatgacgtgaatgattccgcttttcttgtccttgagcagttttttctgtccgaatacattcacccatatggcgtgaagcctttccttgaaccgttgatcaaattgttctttctggccgagcttgatgtaggccagtctcgttttgaccaagtacacaaacaaatagacaacgtaagcggttacaatcagaaataataatgcatttgcgatgagaaagccgctcattccaattccccctttttactgataaagaccgcgatcccctacccccgaatctgtataagattatctttatgataaataatgaatgagtgttcagtcaataattaaattcctgctgttcgggcacactacctttactacggaaaggagtgccggtatgaaggtatttatcgtgattatgatcattgtcgttattttctttgccttgattctgcttgatatcttcatgggccgtgccggatacagaaaaaaggcgtacgagcctgttttttcaaaaaagaagagtgacatcgaattgatccactgcggcgctgatctcgttgagcggatgatgaatgatattcgccaggccgcctcttctgttcacatgatgttttttattatgaaaaatgatgaggtcagccacaatatgtataccttgctgaaaacaaaagcccaagctggcgtatccgtttatttgcttctggattgggcgggctgccgggcaattaaaaaaacggcgctgcagacgatgaaaaatgccggcgtccatgtccatgtgatgaatcgtccccgttttccttttttcttttttcacatgcaaaaacggaatcaccggaagattacggtgatagacggaaaaatcggttatatcggcgggtttaatatcgccgaagaatatcttggaaagaaagcgaagttcggcaattgggaggattatcatctgcgcatgatcggagaaggcgtacatgatcttcaaacgctttttgcttctgatctaaaacgaaataccggaatcgaactgggttcggatgtttggccaaagcttcagcaagggactatttctcacaagatatatgcgaccgacggttattcccttgaaaacatatacttggccaacattgcccaagcgaagaatcgccttacggtttgcacgccttattacattccatcaaaaccgcttcaagaggcccttattaacgcaagaaaaaacggcgtatccgtgagaatcattgtaccgatgaaatcagaccatccgctggtacgagaagcagcttttacgtattattcggagctcttggatgccggctgccttatttatcgttattatcaagggttttatcatgtaaaagccctcatcatagacgaccatctcagcattatcggaacagccaacttcgataaacgaagcctgttcttaaatgaagaggtgaatgttgaaattgatgacgaagcgtttacaagtgaagtctatgccacaattgaggaggatatgaaaaagtcggagctgctgacgatggaggatttcagcaagcgcacattcaggcagcgcccggcggaatggctcggcagggcattatcttatttcttataaaggagagttcctatgattttcagattcgggttcgtttcaaatgcgatgagcctttgggatgcgtctcccgctaaaacattgacattcgcgcgttattcaaagctttcaaagactgaaagaaaagaagcgcttctgactgtgacaaaagccaatttgcgcaatacgatgagaacccttcactatatcatcggccacggcattcctttgtaccgtttttccagttcgattgtgccgctggctacgcatcccgacgtgatgtgggattttgtaacaccgtttcaaaaagagtttcgggagattggagagcttgttaaaacccatcaactgcgaacaagctttcatccaaatcaattcactctgtttacgagcccgaaggaatccgtcacaaaaaatgcggtaaccgatatggcgtatcactaccgcatgcttgaggccatgggcattgctgatcgctccgttatcaacattcatattggcggcgcttacggaaataaagacaccgccactgcacaatttcatcaaaatataaaacggctgccgcaggagatcaaagagcggatgacacttgaaaatgatgataaaacatatacaacggaagaaacgcttcaggtctgtgagcaggaggatgttccgtttgtctttgactttcatcatttttacgccaatccagacgatcacgccgacctgaatgaagcactgccccgcatgatcaaaacgtgggagcggatcggccttcagccaaaggttcacttgtcttccccaaaatcggagcaagcgatacgcagccacgccgattatgttgacgccaactttttgctgccactgttggaacgctttaggcaatggggaactaatattgatttcatgattgaagcaaagcagaaagacaaggcgcttctccgcttgatggatgaattaagctccatccgcggtgtcaaacgcatcgggggcggtgcgctgcaatggaagtcataaatgtgcaaaaataggtttacgacttgtcagctttgggaacttaggctatataagacaacaatcgatggaggagaaagatcatgaaaaatatcaagtctctgaaagtagccgcacaggcctttactttaagaaatttgattcatctttataaaatgtgccattccggaagccacgaggtttatatttattcaaagaaaacgatgtgcaaaatcaaaagcttaattgagcttgaaacgttccgcatggctcataatgaaaaggaatatctgatcgtagttgaaggaacaaaagcatcacagctcattgaaaaattccaaaatctcatcgagcctgctgagagagaagcgctctaacttacatacaaaaaaggatagacatctgtctatcctttttcttatgctcttacataatggagctgaaccgcttgtccaaattgttttgtcccttttaaccgcagttttgtttcatttgttagttcgtgaaacagcgggatgccgcttcctaaaacgacgggaataacagtgatgatgaattcgtcgatggcatcttctttcataaagtcattcacaagctctgccccgccagctatccagatgtttgagcctttttcctgtttcaaacgggcagtgaaggctctggctccctcattgataaacgtcacatgttcatcttgataactgtcgggcgatcctgtaaaaacatagcaggttttatcctgatacgggaaaaccggtgttagcactttaacgtgctcatatgtgctccgccctaaaatgactgtatcaacagtctgataaaaatcactgtagccgttgtcaccttcaccttcaaattcatccagccaatcgatgcttccatcttcttttgcgatcatcccgtccaatgaaacagcaatgtacagcacagtttttctttccatgttctcctcctatcgatgcaccatttgcccgaattgcgcttgatgcagcctgctgtataggcctccggcttcgatcaggtcttgatgacggccttgttcttcaataccgttgtttgtgacgactacaattctgtccgcgtctttgattgttgccagcctgtgggcgatgacaagcgtcgtgcgcccctcagacaactcttgaagcgccttttggatcgccgcttccgtctctgtatcaagggctgaggtggcttcgtcgagaatcaagatcgacggatttttcaagaacatccttgcaattgacagacgctgtttttgcccgccggaaagcttcacgccgcgttcgccaatcatagtatccaacccatcgggcatgttatggacgagctcttccagatgcgcctgcttcacagcttgccaaatgtcttcttctgatgcgcctagtcggccgtaggcgatattttctctaagcgtgcccgagaataagaaaacgtcctgctgcacgacgccaatctgcccgcgcaacgaagaaagcgtcatgtcttttatactgatgccgtcaatcgtaatgtcgccctccgatgcttcataaaaacgcggaagcagactgcaaagcgttgatttcccagcacctgacggaccgacgaacgccaccgtttcccccgcttgaatggataggttgatgtcattgaggacattgtgatggtcatcatagccaaacgaaacatgtttatagcggatattgcccttcaggccggaaacatctctcgcatcaggtgaatcctgaatgtccggctctgtctccatgagctccatatagcttttgaaacccgcgatccccctcggatacatttcgataatggcattaattttgtcaataggcctgaacagcacatttgtcaggagcacaaacgccacaaattccccgtacgataaggagccgcgaatgacaaaccacgtcccgcacaaaaggacaaacagcgtgacaaaccgggtcagcatatagctgattgacccgtttttcgccatgattttgtaggaagaaagctttgtgacacgaaaacgctggttgttgacggcgaagcgttctttttcaaacgcttcatttccgaacgcctgcacaagccggatgccgccgatgttattttctacacgcgcgctgaagtctccgatatccttgttcagcgtggtaaatgctttggtcatttttttgttgaaataaagcgctagccaaatgacgatcggcataatgataaacgttaataaagcaagctgccagttaataaacagcatcactccgaacgccccgagaatggtcatgaccgcaatgaataagtcttccggaccgtgatgggcgacttcaccgatatacattaaatcgttcgtaagcttcgacatcagcgttcccgtcttgttgttgtcgtaaaatttgaacgagagcttttgcaaatggtcaaaaagcgactttctcatatcagtctcaatattgataccaagcatgtgtccccagtaggtcacgatatactgaagagccgagctgagcgcgtacaccgcaaataacccgattgaggtcgcgatgatcagcccccagtccctgcccggcagcaaggtatcaataaaataattgacaatcaaaggaaaactcagctccattaaacctcccgcgatcgctgagaaaaagtcgagaaagaacaacgttttatatggtttataatatgaaaaaaattgccgcagcaccctatcttcccccaatgtataaataactgataatatttctcaattatactatacacgggctgttttgaaagatcagatttcttttttcttacagaacacctgaaaacaggcgggcaaatgactcttttgtccggtcagccacgcctcttttataaaagccgacagggctgagcttttcactttcctgcatatcctcttcaaaatggacctcaagggttcggatcgcttcggcatccgtgaagaacacattcacttcaaagttgagctgaaagctgcgcatatccatattcgcggtgccgacggaggcgagatcgccatcaatgatcatgactttttgatgcatgaagcctttttggtaggagtacacttcaatgccctcaaggagcagctccgggaaataggacctcgacgcgtattgggtcaaaaagctgtcgttcttctccggcaccataacccttacctctaccccctttgtcgccgctgcttttagcgccgtgcgaatggattcattggggacaaaatagggcgtggcgatccatattgatttctgcgctgaagaaatcatttcataataaaggtcgctcatgctttctttcatgtcagggcctgtcgcgacaatttgataaatgcctcctccttccacgggaaccggggtattgtactcctcttgatcaattagcacttcattggagacgtattcccaatccagcataaagatagcgtggagcgtttgcacaatttccccctcaagccgcaggtgtgtatctctccaaaatccgatgtgcggatctctgctgatatattccttcccaacatttaatccgcccacaaaaccggttttcccatcgatgatcacgattttccggtgatttctgaaattcagcttctggttgaaaaacccgtatttcagcggagaaaacgggacgatgtccacccccgcttgtttcattctcataatatctcttcttgccagcttcatgcttcctgccgcatcgtataaaaacctcacctcgacaccctggcgcgctttctccatcataatatccatcatgccgcgtccgagcatgtcagatttaaacatatagtattcaatatgtatgtaagattccgcttttctcattgctttgaaaatgtccgggaaggtttcttcgccgtttttcagcactttgatgttgcttttcgtattgatattcatatgggcagccctgatggaatatgtaaagaacctctcttgattgtccttcagccctgtcacttcgggcgtttccttcttgtcaaacagcttcctgagcttttccctgttgtacattcgttttgtcttaaacagctttccctttacataaagctgtcccgaaaacagataaaacacgtagccgacgattggaaaaaagacaagaatatggatccatagcagcgtgtgctgcgaggtgcggttttcaagaattaatgaatagatgctgaacaaaataatgcttatatagcaaagcaatcctccgtaaaactcaagcctggaaaccggaaaaaaccaaatgacatatgccccgatgagcatcatatataaaaagaaaaattccagtctccttttcagcatcctgattctctccaatctgattcaattacctctgtattacctcttttttctaatcgataaaccttgtaagtaaataacctctccgccgaaggaggagaggtttagaaaaactaactgtcacggaattcatccgcatcgtttctgcagaaataaagcaagactattggcaacgccgagtgaagtctgatgatacaacatgagcggcaggccgaacccgctcagcactccggcaagcgccgaaaaagaggcggcgctgtgactgcaaatacggtggatagagtgaatttgatgcccactctgatgagagaaaatatataaaacgggatattgatcagaaagatataaggagttagtcaggctgagtcataatctgctgttccgccggtttaaaatgagtaaaatccgttttattcttgatcttatttccaaatacaaacacaacaggattcccggccgcccagccattacctttgcagaaaaaaccccctcctgggggggattttcatgagcgtttccgatatacaacgtagctgcgggtcagatacttgagcggcagactgaacacatgaaccaatcttgtaaacggccacaggataaaaacgacgtatcctatcacaatatgaaacttaaaccatagcgggacactctccatcaaagaggcgtcaggccggaacaaaacgatttccctgaaccagggcccgactgtggtccggtaatcaaatcctttcgaatcaatgttgagaaacgtggccgcaacgcccgacagcatcatgaacagcagcaggagcagcgtaaggatatcggatggcgagctcgttttgcggattcttttgtcaaacagccttctgtacgtcaggatgacaagtccggtacatgccgcaatgcccgccggcaagccagcgccaatcgccattttgtgatacatatgctctgaaatgccaagggaagcatacacgccttccgggatcagaatccccatgacatgcccgccgacaacgcacagcagtccccagtgaaaaagtgtgctgcccgccgcaagttttttcttttctaacatctcgcttgatttcgccgtccagccaaattggtcatgctggtagcggtaaatatggccgccgataaagattgtcaatacaatgtatggcataataccccagaggatctgcccgctcatgcctgaacagccccttcaacgctttcacgtacgccaatgttttcaagcgcggccagcagcacgtgcagcagttcagcgtatatactgtcatttttttcgagacgggatgccagctccctcacattggacagatatttctcaaacacgcttctcgctgcttcaatttctgcagccgcagcaaattccagcatcagcggcagataatcaggcagctctttctctgtcggcaggaaaccggattgctcgtatgtgttttttaaatgcagcaattcaacgccgcgttccctttgctcgcccgagttaaagtaggtgacatacatatttgtttttttcccaaagtcgaacgtatagacatagtgttcaatcagcgcttccggtgaaaagctggctgacgcctcgaaaaagtgcagcagcttctcccggatttgccggttgctgatttcatggataagagccttccaatcgggaatctcggctctccactcttcatccggataagagagaagagaggaaagagcggagaacgtcatttgccggtctgtggtgttcatcttgttacacctcatttatcaaaagttagaaacaggagccggggccgcctgaaaatgataagccgcagctcccttgttcagcatataaatctgaaacttcttctcgatgactgctcggtatcacaaagcggtcatcatatttggcaatcgcaagcagccgatacatatcttcaatttgctgttctgttaagccgacactggagatcagttccggatcgattgatttattcgtctggatcgctctcatatactggcgcatgacagacattttctttaacgttgaccgaatatgatccgtatcaccggctgttaacagctgcgccaaatagtctatcgggattctcatttggtcgatagccggaaaaatatcttccgcggattgccggctgccttttccttcaaagagattcataatcgggctgagcggcggaatgtaccacaccatgggcagcgtgcggtactctggatgaagcggcagcgcaatcttccagtcaatgatcattttatagatcggcgattgctgcgcagcctctatccattcagccggaatgccttgttcttttgccagcttggcaacctcaggatcatttggatcaagaaaaacgtccaattgggaatggtagagatccttttcattttcaacagatgccgcttcctccactttgtccgcgtcatacagcatgacgccgaggtagcggattctgccaacacacgtctcagagcagatggttggcagtcccgcctccaaacgcggaaagcagagtgtgcatttttccgctttgttcgtttgccagttaaaatagacttttttataaggacaggatgagacgcaatatctccatgaacggcatgcgttttgatccacaagcacaatgccgtcctcctcgcgtttgtacatggcgccggatggacaggatgagacgcacgccgggttgatgcagtgctcgcaaatacggggcaaatacatcataaagacctcatcgaattctgttttgatcgattcctccatcttttgtacgttgggatcttcaagtcccgttatgtggccgcccgcgagatcatcctcccagttcggtccccattcgatattcataaaatcccccgttaaggacgatttcgggcgtgctaccggctggtgttttttctgcgggctgttcgttaatgtttcataatcatagttccagggctcatagtaatcatcaatcgacggctgattcggattatagaaaaggcctgcaagccgattggttttcgagcccgatttcagctcgagctttccttttttcaatgtccagccgcctttatatttgtcctggtcctcccattgcttcgggtagccgatgcccggctttgtttctacattattgaagtacatatattccgcaccggaacggtttgtccacgtgtttttgcaggtgacgctgcacgtgtggcagccgatgcatttatccaagttcatgaccataccgatttgcgctttaatcttcaagccaatcgacctccttcagcttgcggatgacgacgttcaggtcgcgctgattccccgttggaccgtaataattaaagccgtagctgagctgggcgtagccaccgatcatctgtgtcggcttgacgtgaatccttgtcgggctgttatgggtgcctccgcggttattcgtcagctttgtgccgggcacgttgatgtggcggtcctgggcatggtgcataaacgccattcctttaggaatccgatgagacaaaacggctctcgcgacaacaacaccgtttcggttaaagcattcaatccaatcgttgtctttgatatccgtgtcctctgcatcatctttattcatccacacggttggcccaccgcggaacagcgtcagcattggcagagaatcaaaatacatgctgtggacagaccatttattatgcggcgtcaaataattgaggacgatttcttttccctcttgatcaggccgcttgctcagaaacgggcgatgctggaggatcggtttgaatgtcgccatcgtttcaccgaattccatcatcagttcatgatcgacataataggattgtctgcctgtcagcgtccgccacgggattaatttttcaacattcgtcgtaaacggcgaatacctgcgccctcctttttcagagccggaaaacgctggagacgtgatcaccgttttcggctgggctgtaatttgttcgaacgtaaagcactcttcctcgcgttcttccgccaggtctttcagcttcaggttcgtgatgttttcaagtgattcccatgctttgacggcgacctttccattcgaagtggatgatagggttaaaaccgcttctgccgcctgctttgcttcacttatatttggacatccctttgccacgctgtctgaggtgatttctcccagtctctttttgagtgattcatattcatcggctattgaccagctcatcccttttgttccgctcggctttaaagcagcgttaggaccgagtgcggtcattttatgaaaaatgtgtttgtaatcccgttcaacgacttggatgttcggcatcgtttttcccggaatggcttcacattcgcccttgctccagtcattgattttgccgaatggctgggccaattcctgcatggtgtcgtggaggagcggcgtcgcaaccacttctttcaccggctccatattgacttcttctgccagatcggaaacggcttttgacagcgccttgaaaatatcccagtctgacttcgattcccacggagctgagatcgccggagcaaatggatgaatgaacggatgcatatctgtgctgctgagatcgtgtttttcataccatgtcgccgccggcagcacgatatcggaatacagcgccgtacccgccattcgaaaatcaagattgattaataagtcgagctttccttccggcgcctgctcccgccatttgatttcttctgggcggatgctgtcgctgtcgtcattcattaaaccgttcgttgtccccagcaaatgcttgagaaaatattcatgcccttttcctgagcttgagatcagatttgcccgccatacaaagagattccttgggaaattcacttcattgtcaggatcttcaatcgcgaatttcagttttttctcttggagctgtgaggccacgtacgcacctacgtcttcaggtgttgctgcccctgctttttcagcttctttatacagatcgatgccattttgattgaaagtcgggtaagacggaagccaccctagccgcgccgccagcacattgtaatcagcgtggtgcttgtagcgggatgacgcagcaatcggtgatgccaaatcactgatcggctggtcctcataacgccactgatctgtcgcaaagtagaaaaatgaagtgccgttttgcagcttgggcacgccctcccagtcctttgcagttgcaatcgtctgccatccttcagcaggtcggagcttttcctgcccgacgtaatgggcccagcctccgccatttacgccttgggcgcctacaagcaaaacaagatttaacactgctcggtagatcgtgtcggagttgaaccagtggttaatgccggctcctacgataatcatagaccggccgtctgtatcgatcgcattttgagcaaactctctggcaatcttaacgacagcttcttttttgattcctgtcatttgttcctgccaggcaggcgtaaacggctcaggatcatcataggagacagcttgttgttcgccgatgccccgatttacgccgtagttagccagtatcaagtcaaacacggtcgtgacgtacgtctcttcaccgttcaggttcatttttttaataggaagatcccgctcgagcactttgtttccgtcatttgaaaaatacgggatgcgcaccgtgccgatttcatcctctattccgagcacagagagacggggttcaatcggttccccggtttcttcatcaatcatgtgcaggttccatttctgctgcccgtcccagcgcgagcccattgtcccttggggtatggcaaatgaacttgtctgttcatcccaaaccgcaggcttccactgatcatgctttgtcttccgcccgatgtccttcgcatgcagaaaccgtcccgctgtgtatacgccattttcttttgacagagtgacgagaaatggaaaatcagtgtattgcttcgcgtactcaataaaacgttcagtttcttggttcacgtaaaattcctgcagaataacgtgacccatcgccatcgcaagcgccccgtcagtcccttggcgaatactcagccagtcatccgcgaactttgaggattccgcaaaatctggactgatcgaaatgaccttagcgcctttatagcgggcctccgccaaaaaatgcgcgtcaggcgttctcgttaacggaacgttggagccccatgtgataatatagccggaattgtaccaatcactgctttccggaacgtccgtctggtcaccccaaatttgcggggatgctggaggaagatccgcataccagtcataaaaactgagcatagggcctccgattaacgacataaaccgggagcctgatgcgtggctgatcatggacatggccggaatcggagaaaaaccgacgtttcggtcaggcccgtatttcatcactgtatacagcagagaggctgaaatcagcttcagcacctccggccattcagcgcgcacaaaaccgcctttccctctcgcctgtttataggacttcgctttttcagggttttcgacgatcgatttccaggcttccaatggattttgatgcgtctgcaatgcctcccgccacaaattgatcagcacaccgcgcacgtatggatatttcacacggagcgggctgtagatataccatgaaaaactggcccccgcgggcagcctctcggttcaaaatcaggcatatccgggcctgttgatggataattcaaattttgcccttcccacgtgacaattccgtttttcacataaatattccagctgcaagaccctgtacagttgacgccgtgggtggagcgaacgactttgtcgtactgccatctgtttctgtatacattctcccaatcgcgatcctcgcgggtagtttggctatgtttatttgaatggtgttcgataggagagaaataattcaatctcctaaacaacggactcattttctttttcttcatgagagttcactccttccgagtcaggtgatgctaagttcactataaacagagacagcgtgttttcttgtgaactatgtcacacactctgcttttttcacaaaatgttcacacaaaggagaaggaaggctgagttcaggcaggacgcttgggtcattagctgcctttcattcaaagatcaaaaaaaaccggctctatttaagaaccgggctcggcgttttcatcctgtgatgtatgcagataccgcaaaaataattgataggaacaaaaaacattttgctgaagcatagccaaaaagttcatttgcagctgcggatgataagacatcattttcttaaatatgtaatatgggatgttgagaatcagaatgtctgaagtggcattgactgagataaagggcgataaataaagcccgcctttttcatcaatcggaaacacatcgcctttttcccacagcgcaacggttttcgacccttcagggagccttgtgtccataaaacggacactgccttttaatacaatataaacagattgagaatgaagaaaagatggagactgatcacatgaaccgcggataaacgtgccgtttttcagcaaggtttcgacaatggatagaggcacttcattaaacataggaagttgtttcagaaataataaatagtcacactgattcataggaaaacctcctgtgctaagctaaggatagctttagtgtagctcgactgagcctgtacagcagtgatgtatttcacagcctgtatgatgaatgtcacttatcaggagggtgaatgcatttataatgaaagaaaaaaggaggatttcgatgaaggcgctgattccgaagcagcacggggcgtgggcgatgctgctgatcccatttttactcggcatggtcaagggaggccccgttatttggcatattccgctcttcctaggctggcttttcctatacttagcggtttatcccgttacgcttgccttaaaaaagaaccaaagcaaaccttatcaaaagtggatgtgttattacggttttcccgcctgctgctttttgatgatctcggtctttcataagccgcctctcatctgggtgggcgtttctttactgccgctgtttctcatacatatgtattttgcccgcagaaaaaaagaacgagccctattgaatgatgttgcaggtgtcttgttcttttgttcgggcgggtttgcgagctgctggctggggatgggaaccctcgacggctgggcttggtttattttcttgcagtctgctttattttttatcgggagttccttttatgtgaaatcggtgattcgtgaaagaaaaaacaggacatttgcatactggtcatggggatatcacctgctgctcccctttttatccgctcttttcggagcaggatgggcgtttctcgcttttatcccgagcagcttgcgggcatggttttttcatggaagggattggcccgtaaaaacgattggcattctggaaatcgtgaatgcctgtttctttcttgccgtcatgtgcctgtttatcacaaggtaaaaaaacaaggacaccgctgtccttgttttttcagtcaatattgcaaatctccagcgggcaattttcacactcaatctcacatcgtaaatagtcccgcttgtgcaaaataatttttccggattcgtctatcgaaataaccccttttttgcggagatctcccagcatacggttgatgctttcccgtgcagccgcacaaaactttgccaaatcctgatttgtcaggacaatgttaatcagaatgccgtcgcttcgctccactccgtagctgtttgataagcggataagggtagaatagagcgccccctttttgccatgaagaagcagatccctgattttggactgaatcttccggaggtgcgtgctcatccatttcatgaactcaaatgtcaaagcgccgttttggattaattctttttccagcttatttttattaatgacgagcacctcgccatcctctagtacttttgcactgagcatataccttggttcttcagtgaaaagtgttaattctccgacgatatcatgcttttggcagattctaagcgtcaggtcttttccgtcagatgtcagcttgccgatttcaatgagtcctgattgaatcagataaagctcttctgcatccattccttcccgaaacaaatacgtgtgtttttccatttttcttttcgtgctgatcgattccagcaattcatacagatcgctggatatatgatcactatcagatggtcgaacagagagaaaattcatgagctcacctcgaagaaagtcacgttgtgtgtttattgtaacgtgaattgatttgtacccatcgagaaaaaactaacaatcttgtgaatgccccagtgttagttgatgctctggctgtttctctccgtgtgtgttttcattctttcctgccaatacatccatatgacaaggacaaaactggctaacgccacctctgaaagcgccataaacccgatcgcgtactggcctgttgcctgaaatacactcgccaatatgagcggaggaaaaaagccgcctaaaccgcccatggcagacacaatcccattggcaatccccgcttgcttcgaaaaatagaaaggaaccagtttaaaaacagtcccatttcctacgcctgagcagacggccacggttaatgatccaaacgtataaaggccgattgtcggcgagaacgataggataatgcctgataatgtaagcccggcaaaaacaaacatcaagatgcggagcgggctcattttatcagccaggaatcctcccgcaggcctgagcagcgtagaaaccgcaataaagccagccgtccgcaagccggcatctgcaggattcagcccaaaatgctccaccagaaagttcggcagatagatagtgaaggcgacaaaggcaccgaacgtaataaaataaaacaggctcagaaaccatagcacatgatttcggtaaacagctttgatttgagtcttaacagaaactttgaccttcttctcatgcctgtcgccaaacaatacgtgcagtaaggcaaagacagacagcaaaatcagatacatttgcacggttgatttccacccgacggcttgagcgataaccggcgctgcaaatgtcgtaacggctgtcccgatatttcctgcaccgtaaatcccattgacgacaccgtgcttttctttcggataatatttcgggagggaggtcaccccaatggaaaacaccgctcccccgatccctaagaaaaagccgcctgcgattaaatcaaacagagaatccgcgatactgatccaaaatacaggaaataaaagcaggatgaaactgaccataaacatgagccgcgcgccaaacctgttcgttaaataccctaaaggaatgcggagaagcgacccgaggatcacaggaatcgccgtcaccaaagaaatctcacccttgcttaaatgaatatctaatgtgatttgggaaatgagtgatgaaatcagcacccaaaccataaaccctgccaccaagcttaatgactgtaacgataattgaatgtgttgacggttgatcatttggcttgcccctttcaatgattcaataatcagtcttatcatacaaaaactcggcaaacaggattgtgaattacatcacacgtttttctcataaaaaaaggacaaagcccgaagactttgtccttttgatcgtgattacattttttccggagccgatacgccgatcagctgaagcgcattgttcagcgtaatttgcgttgccttcattaaagccaggcgcgcgcggctcttctcttcattttcagggtcgatgactttctctgcgttgtagaagctgtgcagagcagaagccagatcataaatatagtttgtgacacggtgcggaattcgtttttccgctgcttccgccactgcctctgggaagccgccgatcgttttcagcagatcgtattctttttctgattgaatatggctgaaatcaagatctgccgccggtttaagtccctgctcttccccttggcgaagcatgctgcaaatacgggcatgcgcgtattgtgcataatacacagggttttcgttagatgttgatacagcaagatctaagtcaaaatccatatgggtgtccgcacttcgcatcgcaaagaagtaacgaacggcatccaagccgacttcttctatcaggtcacgcatcgttacggctttaccggtccgtttgctcattttcattttctcgccgtttttgtaaaggtgaacgagctgaatgatttctacttcaagcgttcctttttcatagcccagcgcttcaattgccgctttcatacgcgggatgtagccgtggtgatcggcgccccaaacgttgatcagcttatcaaagccgcggtcaagcttgtccttatgatacgcgatatcaggaagcaggtacgtgtacgtgccgtccttcttgatcaatacgcggtctttatcatcgccgaacgtcgtggaacggaaccaagtcgcgccgtcttcttcatagacatggcctttttcgcggagcgcttcaagcgccgtgtcgatttttccattttggtacagtgaagtttcggaataccacacatcaaacggcacacggaagttttccaagtccttgcgaagcttgtccagctcgtatttcaggccgtattcacggaaaaacgcgaggcgttcactttcctcttcgttaacgaaacggtcaccgtattcctcagcgagacgctttccgatcgcaatgatatcctcgccgcggtagccatcctccggcatcggtttttccaatccgagcgcttcaaagtaacggacttcaacagaaagcgccagattgttgatttggtttcccgcatcgttaatgtagtattcgcggcttacatcgtaacccgcttttgaaagcacgttgcacaaggaatcgccgacagccgcccctcgcgcatgcccgaggtgaaggtctcccgtcggattcgctgatacgaattctacctgaactcgttcaccgtttccgatgttcgtttccccgtatgcttcccctgcttccagtacagacggaatcagctttgttaaatattgattgttcatatagaaattgataaaacccgggccggcgatatccagtttttcaatcgaagcctttcctttatcaaaatgggcgacaatctcttcagcgatttggcgcggcgctttttttgccactcttgccagctgcatcgccatattcgttgagtagtcgccgtgtgttttatctttcggtgtttctaaaacaacattgggaatctggctttcttcagccagtcccgctttcagaacggccgctttaatttcttctttcagcacgtccttcatttgttccgcaatgttcatgcgtgagttcctccctcatacgtgatcgtcatattatgtaaatgctcctgctcgtctccgacatgcatgtcatatgcgatgctgatacggcctttttcttcatcgagatcagattgaatcgattttgtgcttgttttcagctcaagctcaccaaatgacattttatatttagcaattgtggaagctcccgttacgaaacgctgattcattttgacagcgcctgacctcatgaccaggacttcgccttcgcttactttcacaatcgttttgactttgcctaagtcgtgttcttcataataagatagatacactttattttgttttacatagtaaaatccggtggtgcggaattcgatgacttcttggtttccgtcatcctcgatcacagacttcacatggagtgttatcggtgtctcttgcttcattctgacacgtccttttcatcattccactttgacttgaatagtataatcattcggtttgtaaacttcaactgcttctatcttaccatcattgctcatcagatttgaagataaacctcataaaaagcatttccttatatagaagagaaaatcatatcactaattacctttaggaaatgttacatttttccgaaatctatcatttccttttcacatttttttcaaaatatatgtattgaattagtaatttgatagttttaagataaaagtacaacatagatctgctagaaaaacaaaaaaagggaggattcaattatgaaaaaagctgtcattgtagaaaacaaaggttgtgcaacatgctcgatcggagccgcttgtctagtggacggtcctatccctgattttgaaattgccggtgcaacaggtctattcggtctatgggggtaaggatctcccaaaagggcatagtcattctactatgccctttttaagtaaattacaatttttaactaaaatctacctcttggatatacatacacaaccgtttttcatttgaatcatatgtataggggatggtattttgtttatagagcagatgtttccatttattaatgaaagtgtaagggttcaccagcttcctgagggtggcgtgttagaaatcgactacttgcgcgataatgtctccatttctgactttgagtatttggatctcaacaaaacggcttacgagctttgcatgcgcatggatggccaaaaaacagctgagcagattttagctgagcaatgtgcagtgtatgatgaatcaccggaagaccataaagattggtattacgacatgctcaacatgctccagaacaagcaggttattcagcttggaaaccgggccagccgccatacaatcaccacgagcggaagcaatgaatttccgatgcccctgcacgccacctttgaactgacgcaccgctgtaatttgaaatgcgcccactgttatttggaaagctcacctgaagcgctcggcaccgtgtcgattgagcaattcaaaaaaacggctgatatgctgtttgataacggtgtattgacatgcgaaatcacaggcggagaaatttttgtccatccaaacgccaatgagattcttgactatgtgtgtaaaaagttcaaaaaagtcgctgtcttaacaaacggaacactcatgcgaaaagagagtttggagcttttgaaggcttacaagcaaaaaatcatcgtcggcatttctcttgatagtgtcaattccgaggtccatgactcctttagagggagaaaaggctcttttgcccaaacttgtaaaacgataaaattgttgagtgaccacggtatatttgtcagagtcgccatgtctgtcttcgaaaaaaacatgtgggaaatccacgatatggcccaaaaggttcgggatctcggggcgaaggcgttctcttacaattgggttgacgatttcggaagaggcagggatattgtccatccaacgaaagacgccgagcagcaccgcaagtttatggaatacgagcaaaatgtgattgatgagtttaaagatctgattccgattattccttatgagagaaaacgcgcggcaaattgcggcgctggctggaagtccattgtgatcagcccgttcggcgaagtacgtccttgcgccctctttccaaaggaattttcattgggaaatatttttcatgattcctatgaaagcatctttaactcccctctcgtccataaactgtggcaagcgcaggcgccgcgcttcagtgaacattgcatgaaagacaaatgcccgttcagcggctattgcggaggctgttacttaaaagggctgaactctaacaaatatcaccgaaaaaacatttgctcttgggcgaaaaatgaacaattagaagacgtggtccagcttatttaggagggaaacgatttgtcaccagcacaaagaagaattttactgtatatcctttcatttatctttgtcatcggcgcagtcgtctattttgtcaaaagcgattatctgtttacgctgattttcattgccattgccattctgttcgggatgcgcgcgcggaaggctgactcgcgatgagcattttggatatacacgatgtatccgtttggtatgaacgggacaacgtcatcttagaacaagtagatttacatttagaaaaaggcgccgtttacgggttgcttggggtaaacggcgccggaaaaacgacactgattaatacgctgacaggcgtgaaccgcaatttcagcgggcgctttacactgtgcggaattgaagcggaggccggcatgccgcagaaaacatcagatcagctgaagactcaccgttacttcgccgccgattatccgctgctatttacagaaattacggcgaaggactatgtgtctttcgtccattcgctttatcaaaaggatttttcagagcagcagtttgccagtttggccgaggcctttcatttttcgaaatacatcaacaggagaatttcggagctgtccttggggaacaggcaaaaggttgtattgatgacaggcttattgctgcgcgctcccctatttattttggatgagccgctcgtcggtttggatgtggaatcgatagaggtcttttatcagaaaatgcgcgagtactgtgaagcaggcgggaccattttgttttcttctcatctgctcgatgtcgtgcaaagattttgtgattacgcggctattcttgacaacaaacagatccaaaaggtcattccgattggagaggagaccgatctgcggcgggaatttttcgaggtgatcggccatgaataacataatccccatcatgtctttgctgttcaaacagctttacagccggcaagggaaaaaggacgccatccgcattgccgcaggccttgtcattctggccgtgtttgaaatcgggctgattcgccaggccggcattgatgaatcggtgttgcgcaaaacgtatatcatactcgcgcttctcttaatgaacgcatatatggtgtttctttctgtgacatctcaatggaaggaatcttatatgaaactgagctgcctgctgccgatttcttcacggagcttttggctcgcccagagtgtcgttttgtttgtcgatacctgtttgagaagaactttattcttttttattttaccgctgttcttatttggaaacggaacgctgtcaggggcgcaaacattgttttggctcggcaggttttcgttttttaccgtttactccattattttcggagttgtgctaagcaaccacttcgtcaaaaagaagaacttgatgtttctgctgcatgcggcgatattcgcctgtgtatgtatcagcgccgctttgatgccggccgccacgcttccgctttgcgcggtgcatatgctgtgggcggtgatcattgactttcctgtctttctgcaggcgcctccgcagcagagcaagatgcattcatttatgcggcgatctgaattttcgttttacaaaagagaatggaaccgatttatctcttctaaagcgatgctgttaaattacgcggtaatggcggcgttcagcggcttcttttcgttccagatgatgaataccggcatcttcaatcagcaagtggtttatatcgtgatttccgcgcttttgctcatctgctcgccgatcgcccttttgtattcgattgaaaaaaatgaccggatgctgcttatcacgcttccgatcaagcggaaaacgatgttttgggcgaaatatcgcttttattcaggcctattggcaggcggatttctccttgtcgtgatgattgtgggtttcatcagcggccgtccgatttcagttctcacttttttgcagtgcattgagttgctgctggcgggagcttttatcaggttaactgcggatgaaaaaaggccctccttcagctggcagacggagcagcagctatggagcggtttctcaaaatatcggtcttatctgttttgtcttcccctattcttagccacattagccggcaccgctgtatccttggcggtcattccgatagccggtctggtcatagtctattacctgcaaaaacaggatggtggtttctttgatacaagcaaaagagaacggcttggaagttaacctgctgaagactcatcaattttcaactatttcaatcgccgcgagctttctgaaaccgatcgaaagcgcggcggaacctgaggaagaaacgatttatttttacggcgccgccgcatacctgaaggagcaaattattgacgctttcggttgtgctgccggcagccgtttcatgtactcagcgaatctcttttttgatcagcagctgaaaacctgcgggacccgtttgattcacccattatataacgggaatcttcatgttgacgccctgctgaaaacttttgcagacttgtctttcccttcttctctttcattcgaagcagttgaaaaggccaggaatgagctgctgctgagaatcgaaaagaaattcactgatcctttctcctactcggcggcgcgcttggctgaggaggtcttcggaaacccgatgtacggcacaggcatgtttggccggaaagacaggataaaggcgattcatcctaaacggtttctcgacgcaacggactttatcgttgatttagtgtcccagcaaaaacagctgaacatattgggacaagtacaagcatgtgatgttcggggacatgccccgcaaacgtccgctgtaacgtccgaaagaatacccgtaaaccggcatgtttttgaaacagagacacgcagcgctgcaggtccttccgtcttgacactcggatttgactgcggagagatgaaagatgccagcgattatatcaaaatacagctaatagacggattactgggaaagtacggccattccgctttattcaagcacttcagagagaaggatctggcagtctatcacgttatcacccgttacgatgtcatgaacaatttgctgcttgtttcaatatgtacagatcagcttcatgagatagacattcccccgcgcgttttggaagctgtctcagcttttcatacagatgagcgggaactagaacaggcaaagcagtttttacgcaatgaattgctgctgcaattcgattctcccgaaggtctattggcctatatggggatcctgcgccgcttctcctgcacgaaagaagccttgctggatggcatctcagcggttacatgccgtgatgtattgcaattcatagcgaccatcaattatatcggagctcatgtagtaaggggatgaagagatggaaaagaaagccttttttcaacaactggatgaacgaaccgatatcagatacacagacagcggactaaaaatattcagattgaaattcccccgcgcccacctgcggctgtgcaatgtaaaaatcgattttggaagccgggatgtatgtatacgggcagaatccggtgatacactgcttccgtatggcacagcgcattttttagagcatcttctcttctggcataacggccgcaatctgtacagtgatttttttgcgcatggcgcgcttttaaacgcattcactacctacaccgataccaatttcatgtttacctcattaccggatcggctcagacaaacgatccccatcctgcttgatgctttatggaaccactcatttgacaagaagattgtcgctcaggaaaaagctgtgattacaagcgaaattcaaacagcacaccttaaccatcagctctcatatcattatcagctgatcagcatgctttctccctcctcaccagctgccgttttccccgcaggcagaatcgaagatattgaggcgctggacatcagtgatttacaaaaagcctataaggctgcctaccaagcccatcggatgacgctgtttttgattgggggctcagaaaatacagaaacgcttttgcctcctcacctccagctggaaaaacgtccggattatcatgctgaaagaaaaatcatcccggcatgccctccagccctctcacaaaaaatggtgctgggtgatgaggagcggatggaagatacatggaccggattacagatcggcgcacttcccgggcaaaacgatctgttggcgataaagctttattgggatatcgcggctcgtattctatttcaattagattcaccgttttttcaagagattcagcaaacgtaccgtctggaaatcgatcgcttgtcagccgagacttatatatatgaggatggcggtttcttgatccttcacagtcaagggacccattcttcagcttatatcgatgtggcttcatactatgtcacacagaagaaagaacaggttgccgcctggcttcaatacggcaaggactctttgacagacgcgatcatttatgacagcgattatgtgcgtaaatgcttcgagtgggcagccgagtgtgacaggtgcgattgctcgtttcttgacatgtaccacatcattcaagatatggatgcgcaggttttcttgtctctcattgatgcaatggcatcttctaacaaagcgatcattcacgtttctcagaaagaggcgatcagacaatgaaaaaaagcactgtctttacccttttattgctgcttataggtatggcggcttattccttcggatgggttcaggccgttgccgaagccgccgcccaatatgtacagatgatcaacaatgatgctgttcggctcggactgctggcttgtaccgctgccctcctgatgctgcctgcttttctatatcttcattatgtcacccaatccgtgaaaaacatgacagcagcttttcagaaactcacacagtctcatcaaagctgctgtgactttcagcaacacaacttgtgcagccgatatgcagaagacgtcaaatcgctgcgtgacagctataaaaacgtccgccaaacatacgtgatggctgccgtgttgtgccaagtcatcatattcggctgcatgttcgaaatcgttaaagccgtccctttccgccttcacacgccccctgccctttcaatgggacttgcgatgctactgattctgtatttattgttttgcatgcgaacttatttgcggcagcttttccggcacggcagcctgttcagaaaagtgtttgcgggagcgctggcagcagccgggatttggtggatactcagtttctctataagtgaactgctgtttctgattatcctggctaccattcagcaaatcggatcatttatttataaacgattctcttatcgcagcaccgcttctcttgatctataaaatagctacatcgcaatcgcagacggacccgcgccaaccggaatcaccgtcacggctgtataatcacttgtgcggtacacggtcacagcattgtcgttgggctgtgccgcataaatatactgtttgtccggcgttacggcgaggtcaaaagcgccggggagagacacgtttgcaatgatcctctgtctggccgtattaactacatataagttattaataagaaacggttcactatatggctctagaaaataagctctagtgctatcgagagaaaatacaatcgtcctcagcgtttcaaataaacggctgaagtcccctcccctgcttaatggagacaaactaatctccgttacacctttcggccacagctcaccattcaacacgtacgcaaaatttccagcgtaaggagttgcaattaaactgggaaattcaaatgtatctatgatactttctaccaactgcccagtatttatatcatatttatcaaccgaccaactgcttccattagcggtatagacatactgtccattcggatcaagagcaaagtctaaagcgccgggtatcggaatgacatcaatgaccgattgagaggccgtgttaatcacatatatagatccggcggccatcacgtatgcgaactcatcttttggatcaaattcgatctttctcggccctcctccaacagtaatggtatttatgatggttaatgttttattatcaatcactgagacaaggttggtatttccatggaggacatacgtgaatgctttatcgaaagtaacgcctagattagttggcacgtcagaaaaagggattgtttttacaacagtgtttaaatctgcatcaataaccgaaaccgtgctgtctccagtattggcagtaaacacatacgattgagggtctggtgatggcggtaaaacaagtgtcccggtcaccgtaagcggactgccgtagaaaggcggtacaatgagcagatcttccactgttatttgactgaaatcaggacagcggccagactgtgctgcataataaacaacttgatcaatctcttcggtatgaatcacagaaaccgccccattgccttgtccatattgatttcgcacaggcgacacactgacaagaagcgtaatggtcccttgtactctcacagcatatcgaacaccgatatcttctggttccggcccagtctggattaagcaaggctcactgatacaggacacattgtctgtactccatgtaacagccgctgacgcttcggccgaatcaaccttgaagccctcagggatatctatcggcacttgaaacggcgcttctcggctaatttcctcatcacaaaaacagaaacaattttcctgtaaagcagaaagatcattctttttcatgatttcacgtccttttagaaatgcacaacatgcagcggttaaatcgtaatggcacccggtgaaaccccaagagatatcacagtttcctcagaataatcatctgtgttgtaaacaatgatgctctgctctataaaacgagttgcatacagaaaatcgccattcggggtaaacgcatagtctgttgctgattgcggaagatttccaattacacctgctccattcggactgacagaatataaattgccagtgaagctgtcatgtaaatacacctctgatccactcgtaaacattacatatagcccgtcaggctccagctcttgggtatccctgatcgtaaacgtatttaaatcaataaccgtcaaataattgaataagaattcttgttctaatacatacgcataccgctccgtagaatctgtttctatggatgatacgataagctctcgttcaatcgttcctaagacttcaccggtagataagtccactttttgcactaacccaaaattaagaacataggcgaacaacccattggggtcaattgcaatatcaaaaccttctacaggaatagacctctcaacagtcaacgtatcaattccaatcacataaatggcagtaccggtgaaaacataagcaaactcatgattagggataaatctaatcaatcgaggcggctgatccagcaatatagttgctgtcactgttaatgtgtcataatcgatgacagaaatcacattattgttgggatgtaagacaaacacagcgcttttatctggcgtaatttcaatacctgccggattgtacggaagagcaatcgttgtcacaacagaatgagtgtttgtatcaatcacagaaactgattgatcatttggattcgctgtaaacgcataaacgggttccggctccggtacaagcacaatcgtccccgtcaccgataaaggactgccgtaaaacggcggaacaacaacaaggttctcaatcgtgatgtcactgatatccgggcaatcatccggttcatcggaataatagacgacttgatcgatttctgcattgtgaatgacggaaacagccccgtccccttgtccatattgatttcgcacaggtgagacactgacgagtagcgtaacggttccctgcaggcgcactgcaaattgaacaccgatctcatcaggctctggccccgtttgaattaagcaacggtcactgacacaagaaaggctgtctgcattccacgtcacgtttgcaacagcttcagccggatcaacgacaaatccttcaggtaattcaatcggcgcttgaaacatggcttctcggcttgcttctccctcacaaaaacataagcactcttcttgttctgctcctgctttttctttaaaggaaagcttgttttttctcattccttcacttccttttcagacatacactgctcacgcagatataacagaatatggaagtgtaacgtgtttgcttgtacaaattgctgagggtaaacgcttctttttgaaaatatatctccaaacatgcggtgtaacgaaagaaaaaattgcggtttttttgcgcttctcacaagaatgttgatgataaaatatgacatatatagaattatgaagggagggatttgcaaacgtgacaggtgtcatatcttcttcttccatcggagaaaagattaacgaatggtatatgtacatacgccgatttagcatacccgatgcagaatatttgcgacgagaaatcaagcaagagctggatcaaatggaagaagatcaagaccttcatttgtactattcactgatggagtttcggcacaacctgatgcttgagtaccttgaaccgttagaaaaaatgagaattgaggaacagccgagactgtctgatctgctgcttgagattgataaaaaacaggctcgtttaactggtctgcttgagtactattttaatttcttcagaggcatgtatgagctggatcgccgtgaatatgtattagccattcaattctttaaaaaagctgagagcaagctggtttttgtgaaagataaaatcgataaagctgaattctttttcaaaatgtcagaagtctattattatatgaaacaaacttatgtctccatggactatgcacgtcaagcattcgaaatatacagtgaacagactacatatgatatcagaatgattcaatgccagtccttattcggagccaactttttggatttaaaacaatacgaaaaagcaattgcccattttcaaaaagcctttacacttgcaaaaacagagcagaagccccaattaatgggaagaacactttataacatagcactctgcaagcaaaaccaaaacagttttgaatcagcgatagagtatgtaaaaaaatctattcaagtatttgaaggatctaaaatgctcccttcactgccacaagcttttttcctaattacacaaatttattttaaattaggtaagattgataacgcctgtgaatatcataaaaaaggaaaagagtattctgcagctgcgggagataccgtgtatctaacggagtttgaatttttggaatctttatacttgtctggaccggatgaggaacggatagaaaaatgttttgtttttcttgaaagtaaaatgatgtatgcagatattgaggacttcgcacttgatgttgctaaatattatcatcaacaggaaaattacaaaaaagcatctcattactttttaaaggttgaagaagcaagacagcacattcaagggggggtgaatttatatgaaatggaagtataaattattactcgcttgtttagctgtgagtgctgtatttatcacagtcgaagtatcaaattcatcaacagaacattttgatgttgcgcaacgcgccatgatctaaaccgccgtccatcggcggtttttttgtcccctctttacccaatctcccaattcatgctgtgatttttttcaataatcttgaagagagtggaaatgcagcatgtctctgtaaagtgtgagaacccactttacacagtggaatcgagaaaatgatgtgacggagttcgaaacgtcgagcgcgacagtgttgaacagacagctgagacgatcggcgtaagcccgactagaatcgccaagaccctgtccttcagaggggaaggagatcaggcgattctgattgtggcagccggcgatgccaagattaataacaaaaagttcaggcaaacatttggctttaaagcaagaatgctctctcctaatgaggtactggagcagacaggccatgaaattggaggtgtttgcccatttgggttggctcatgatcttgaggtttatctagatgtatcgctgaaacggttttagactgttttcctcgcatgcggcagcagaaactccgctattgaggagaattatccgaattttctttctcaaaagcatggattgatgtttgtaaagactaggaataaaaaacatccagacatcgtctggatgtttacttatttcacaaacccaagcagcatttcacggatgattttgctggctgtgtttgccgtttgctctgagtggtcatacaccggtgcgacttccactaaatcagcgccctttacgtttacctctgaacgcgcaatttcatggaccgatgcaagcagttctttagacgtgatgccgccggcgtcaaccgttcctgtacccggtgcgtgtgcagggtctaatacgtcaatgtcaattgtgacataaaccggacggcccgccagcttcggaagcacctctttcagcggttcaagcacctcaaattttgagatgtgcatgccgttttccttcgcccattcaaactcttctttcatgccggaacggattccgaatgaatacacattgtgcggtccgatcaattctgccgccttacggatcggcgtggagtgagaaagcggttctccctcataatcaacacgaagatctgtatgtgcgtcaaaatggataatcgcaaggtctgggtatttcttgtacatcgctttaatgacaggccatgacacgaggtgctccccgcccatacccattgggaacttccctttttctaaaatgctgtccacgtactcttcaatcatatccaggcttcgctgcggatttccgaacggcagcggaatgtcgccggcgtcaaagaagttcaagtcagccagatcgcggtctaaatatgggctgtattcctcaaggccgattgacacctcacggattctgcttggaccaaagcgtgagcccgggcgatagctgactgtccagtccatcggcatgccgtaaagaatggcatccgcctcttcccactcgggacggctcgcgataaatacttttcctgaataagcttcatcaaatctcatcgataataccctcgctttcctgtaaaaaagcgcaagattcgctcctgcgccataccttcattatttaatcaggtcactcacaaatttcggcagaacaaatgccgctttatgaatatcttttgtgtaatatttcgtctcaatatcgaagaaacggctgtcttccactgcaagcggatcatattttttcgagccaattgtaaatgtccacaaaccgctcggatatgtcggaatgttcgccgtatacagcttcgtaatcgggaagatttccttcacgtcgcgctgtacatttgtgattaattccggtgtaaaccatgggttgtccgtctgtgcgacaaaaatgccgtcttctttcagcgctttagcgattcctgcgtagaatccttttgtaaacaggtttacagccggtccgactggttcagtcgaatctaccatgattacgtcatattgattttcagattttgcaatgtgcataaatccgtcatctacctgcacgtcaacgcgcggatcatccagtttgcctgcgatagaaggaaggaactttttagagtattcgatcaccttgccgtcaatatctacaagtgtcgcttttttcacgcttgggtgcttcaggatttctctgataacgccgccgtcaccaccgccgactacgagaacgtgctccggatttgggtgcgtgaataatgggacatgcgccaccatttcgtgataaacgaattcgtctttttcagatgtcatcaccatgccgtctaaaaacagcatgttgccgaactcttctgtttccaccatttctaaatgctgaaactccgtttgttctgtatgtaacgttttgttaaccttcatcgtaatgccaaagtttttcgtctgcttctctgtgtaccaaagttcgctcaattgtcatctccctttcgaggctgtattcatttattgtaagcgtcttatcagcttttattctcggttgaaatctcattttcacctaaggaaaaagtatagaggatgccggggaaaaagtaaagatgcgtcctgttctgcgatgtttaaaaacgatctttttttctcataatagtagaaacataaaaaaaggggggaacccgttgtggatgcaatgacaaataaacggctgagactgacgctgaaaaccgttcgcgcctttatctttttaggggcttttgcggccttggcggcagctgccgtgtttatgactgtcattttgatagccaaataccagggcgctccctcggtgcaagtgccgcaatccacgattttgtatgcgagtgacggctcaaagctcggggaaacgaactacggcgaaaagcgctattgggtccccttaaaggacatgaatccgacgatcgtaaaagcgacagtggcgattgaagaccagaatttctacgatcatcacggctttgattataaacgcatggccggcgcggcgcttgctgacctgaaagcatttgccaaggttcagggtgcaagcaccatcacccagcaatatgcgagaaacttataccttgaacacgacaaaacgtggaaacggaaatggaatgaggcgttctacacgatccgtctggaacaaaactattctaaggacgagatattagaaggctatttaaatacgatttactacggacacggcgcctacggcattgaagcagcttcccgcctatatttcggcaagcatgccaaaaacctaaccgatgcggaggcggcgcttttggcaggtatcccgaaaggcccttccggctattcaccgtatgtcaatgagacgaaggccaaggaacgccagaaaacgattgtgcggatgatggaaaagcagcagatgatcagccaaaagaaagcggatgaattgatcaaggaacctctttcctatcagcctttgaataagcaagtttccaagagaaaggctccttatttctacgacaatgcgatgagagagctggagaaaaagctcggcatgacacgggagcaaattgaaacgagcgggttaaacgtctatacaacggtagataaacggatgcagcgcatcgccgaggagaccattaccgaaacggttaacgcgggctctgacattcaagtcgggttttcagccattgatccccgcaccggaaacgttctcgcccttgtcggcggcaggaattatcaaaaaagcccgtttgaccggacgacacaggcgaagcgccagcctgcttcgacgatcaagccgttgctgtactataaagcgattcagagtggatttacgccagtcactttaatgaaaagcgaagaaaccgagtttcaaattgatgcaaagggagaaacctattctccaagcaactataacggatactacgccaacaagccgattacgcttctgcaggcgctggcgctttccgacaatatttacgctgtgaaaacgcatctttttctcggcacgaacaaacttgtaaagacggcaaaggaattcggcattaccgcccatcttcaagcactgccgtctctggcactcggcaccgaacccgtgcgtccgattgagatggtcaacgcctatgccatgctcgcaaatggcggaaagaaaatcgaaccgacttttatttcaagggtaacggacgcagccggccacgtgctgtacgaaaacccgaatcagcataaacaggtgcttgatgaaaaagccgcttttgtcacagcgagtatgatgacaggcatgtttgataccgatttaaatggatatacgtcggttacgggacgaacgatagccaaccgcctgacaagaacgtatgccggaaaatcaggaaccaccagcgcagacagctggatgatcggcttcaatccgaagctggccgcaggtgtttggaccggctatgacaaaaacagcaccatcgactcggtcgaagaaaaaagctatgctaaaaccatttgggcggacttcatggaggacgcgctcaaaggcgaaccggaaaccgcgttcaagccgccaaaaggcgtaaccggtgtgtacattgatccggaaacaggctactcatcaggtcccggctgtgccgctaagcattacacatattttgtgaaagggacagaacccgcaaacgtgtgctacggggcagaacccgcaaaacaaacaaaagaccggcttccatccaaagaaaagcccgcttccgagaaaaagtggtgggacaaatggctggggcgacatcattgaaaataacccggctcctcggaggccgggttattcgtatggttccttcataatcgatggaagaatgttagacaatcgagctgaacaatcagttttgggataaagtggtgaatttctcatttcttcggcgctggctttcatctcccagtcgccgactcatatccccctaaaaatgaaaaaccccgagtcttgtttcggctcgggattttccatgtcctatttctgtatcaccagtttactcaatgtttacgaaaaatatctcaaatactttaaaagttcacagaaaattcataaattaattgttttccggaagcaggcttgtttttaattcatctgatgaacggtcccataggccctgatcatgctttttcagaaattcgcctagtacacgcttcgagctgtcgtccattttatcaacgatgattttccgtttcatggatttatccatcaaattcacatgctcaggcagcgacttgtagcctcttctgatgcttctgtcgaccgtcatttcacaggctgtcacaccagcgtaataaggcccctcttcttttctgtcaatcgttacccacacaagccagtatggttttccgttcggcacttcttctttattcgggagaaatttaattcctttttcaacggtgctgcgggcatgcatggcgccgatgtctacgaacgcttctttttcttctacatcaacgaatacgggagaaatgttatcaaggctgagtgcccctacgccaaaaccgccgtgtccgtctgtcggatcacttttgataatattaaacccgattgattttttctttttttcttccatgaagttctacctcctacaaaagcggttgaaatatcgctgaaaacagctttaaaatcgaatctcttcctgcattgagcatcggccacagcacgtaagatcctagcggtgtcacaaacagcaccaaaaatacgataaagccgtagctctccgcctgcgtcattttggtacgcatgcccggcggaacgagatcttctataattcgatagccatcgagcggaggaagcggcagcagattaaataaaaacaagacaagattcagctgtatccaaatggaaaaaaactgatccagccccgtgctgaacgccgcaagcatttccattccgtacgcatgcatcaacactaacaaaaagaaaccgataaacgcaagaatcaggttactgacgggcccggctatagatacgagcacaccggcaagccggggtttcttaaagaagcggcgattcacgggaatggggcgcgcccacccgaagccggccaccaaaatcaaaatggttccgaacggatcaaggtgtttaatgggattcagcgtcagtcttccttgttttttcgccgtatcgtcaccgaatttgtatgcgacataagcgtgggcaagctcgtgcatcgtaaacgacacaattagcgtgatgacgaggtatggcattaaagataacggataatataaaaaacggtccaagtgagatatccctctttctcaaaatgcaagaatttactttattcagtatactataagaagcctctttttctaaagagaggaaacgagataaaggaggattcagcacccatgccatacgtaactgtcaaaatgctcgaaggccgtacagacgagcaaaaacgcaatcttgtcgagaaagtaacagaagccgtaaaggaaacaaccggtgcttctgaagaaaaaattgttgtctttatagaagaaatgagaaaagaccattatgccgtcgcaggcaaacgcctgagcgatatggaataatctctataaagccggcgcttcgcgcaccggcttttattatccctattgagccagcttcgcaataatcgccaagaacgtctttttctcttcggctgttaaacgttcaaacatgccatcaatcagctgctggcggttttcgatcatttgttcagccgctccccggcccgcttcagaaagcgtaatccatacagtgcggcggtcattgttatttctcgatctctcaataaacccttcctgctctaaatgattcagagctgtggtcgtggcagagggagacagtgtgacctccttcaaaatatcctttatggtgcagctcccatgtctgtatatgatccgcagaataaatcctcttacattattcacgtgtttcggaacggtggcttcatctaattgcttcgtgcttttcaaatattttgtaagtgcgtgatccagcaaatttgcttccagtttgtcatggtccatgtcaatttccccatttcgagatgcattcataacatacgaacgatatgatttacttattattttactgattccgaatagggaaagtcaaaaaagcaaaatgtgaattcacagcttttatcctacatgcctcgattttccacctgtttgacaagcttatctttaaatgtctgaaaaggaacatgttcattctgctgatgtccgaatcggcggacgtttaccgcattctcctgctcctcatgatctccaagcaccagcacgtacgggattttctgcacctgcgattctctgattttatagccgagcttctcattgcgctcatcaatgccggctcttatccctgcctgcttcagctccgcctgcacctttctgcaatagtctaagtgaacgtgcgaaaccggtatgatttgaacctggagcggtgcgagccagactgggaaagccccgccgtaatgctcgatcaaaataccgaagaaacggtcgatcgagccgaaaaccgctctgtggatgacaacgggacgaaccttttcattgtgttcgttgatatatgttaaatcaaatttttccggcatttgaaaatcaagctgaattgtcgcacattggtggctccgtttcagggcatcttttatgtggaaatcaattttcggcccgtaaaacgccccatcaccttcattgatctcataagagaggccaagctcctcaaggacgcgtgctaaggcacgttccgacgcttcccaaaggctgtcatcgcctaatgaatcctccgggcgagtcgaaagctcaactgaatactcgaaaccaaatgtccgatatacctcatcaatcagccgaatcgcttctttgatctcactctcaatctgatcctcccgaacgaaaatatgggcgtcatcctgacagaacgtccgaacgcgaagcattccgtttaaagcgccgctgtattcatggcgatgcacctgtccgaattccgccatgcgaatcggcagatcccgataagaatacaggctgtttttaaagatgagcatgtggccggggcaattcatcggcttcattgcgaatcttgtatcatccacttctgaaaagtacatattgtcgcgataatggtcccaatggcctgactgctcccataaccgctgattcatcataaacggcgtacgcacctcatcgtagccggcatttgtttgcagctcacgcgagaagcgctccagctcattgcggacaatctgccctttcggcaaataaaacggcatccccggcgcttcttcagaaaacataaacagccctaactgtttgccgagcttgcgatggtctcgttttgccgcttcttccagcatatgcaggtgcgcatccaaatcttttttcttttgaaacgcaaccccgtacacccgctgcaggacttcatttttactgtctccgcgccaataagcgcctgatactcttgtcagtttgaacgccttgatcatccctgtagaaggaagatgcggcccgcggcacaggtcaacgaattccccttgctggtacagtgtgatatcctccccgcgcggaatatcctttaaaatctcaagcttgagccgctcgtctttttgtgcaaacagctcttcagcttcttcgtaagaaacctctatacgtttgatttcaaggttctcatttattatgtttttcatttctttttcgatggcccctaagtctcctgatgccaagcttttccccagcttcatgtcatagtagaagccgtctagaatcacaggccctacccccaatgacacttcgccgtacagccgttttactgcttgggccagcacgtgcgctgttgtgtggcgaagcacctgcaagccttcttgtgaatcgagtgtgacaatcgaaagctcagcatcctcctccagcttgaaactgagatcaacaagcttgccgttgacctgacctgcggccgccttcttttgcagactggaactgatagaaccagccgcttctttgattgtgatgcctttcggatattcctggatctgtccgtccggaagctgaatgtgtacatttttactcattttaaaacactccttattcattgttgtatataaaaaaacacacccgtcccgcagatagggacgagtgtgtgattaacccgtggttccacccaagttcccgacaaatactatattgtcggctcggtgctgtaacgcagcatagacggcattggatacttcagttccccaatgctgctccaaggcggtaaatgatattcctaagctgggaagctctcacctttccttccctctctgaaaaccgtaactatcattcgtgtccttttcaacgcatttatgtagttcatataaaaaaacacacccatccctctaaaagggacgaatgtgttgatcatccgtggttccacccaaattcccgatcaattacacatggtgatcggcttaaagatgctgtaacgcagcatgacggtatcagatacttgttttccccgatacggctcaaaggcggtaagctgctttccctgcgttaggaagatctcagctgtccttccctctctggaaaccgtaaaaagcatctcgtgtccttatcagtgcctgttgtttcaataattttttacatcttactatatattcccacaaagtgcaatcagtgatttacattttttctgacgcggcagtcccgttatgggcagccagaaacagccatacaagcaatgcagcgaggctgtatgcagcccccatcatcaaaaatgtaaacccggcaccggcataccaagtggcggacagatgaatgatcaccccggttatcgctacgccgaccaaggctccgatttgccggtttgcatttaacgccgcaccggcgatattcgcatgtctttgcccggcagcctgcatgatcacagttgtcatggcaggaactgtaataccggtacagaggttcataacagacatcaacaccgccagctgccaataaggaaaatccggagaaatcagcacaaacaacagcaatgcaatgatacagctgaccgccattgatacaaacataagctgcccggcttcaaatcgattcgccagacgggcaaacagcagattgccgaacacgaagaccgccatcatcggcagcagctccactccagccataaaggaacttgcccctcctgcttcctgcaaaaaaaggctgagcataaacatgccgccaaaaagggcgaaattcagcaaaaacccgataaattgggcagctgagaagcggccgtttttgtataaggacgccggcaggatgggtgcttttgcagaaatttcccgcagcaaaaacagcacaaatgccaaaatcgctgcagtaaatactacaagaatcactggcgagcgccagcccgctgaaggcccctgtatcaaagcataggaaagaaacccgagagccatcatgccaagcagatgcccgatgatgttcacgcggctgctttttcccggaacgcggctgaggattcggtaagctgaaatgagcgcagcagcccctattggcacattgatcagaaaaatactctgccagcccgccaactctaccagcacgcccccgataaaaggcccaagggctgaagcggcagaaacaagcgcggcccacagcccaaacattctcgcccgcgcccgctcatcagggtaagaggcagccaaaaggctgagtgagcttggcataaacaaagctgcgccaattccctgtataaggcgtccggcaatcagcatctgtccatttatagatgcagcgcataaacaggaggccagaacaaaaacggctagacccaagatatagatcgtcttcgagccgaaacggtcagccaaggctccgcccgccagcagaagcgacgcaaaagtaagaatgtacccgtccacaacccacgttacacctgaaagtgacattgaaagagtgtttttcatatcagccatcgccacattcacaacggtcacatcaagagttgccatgaggaaaccaagtgcgagcacgatcagcacggatatgcctgttgatgatgttgattcttgtatagacccactatttttcattacaattgccctttcacttgcttgattacccaatcatctattttttcaagatcatacaattccccgactctgtccatgacatgctgcaaggattcttctctcataagattggaccatttatcctcgatttcccccatgactgtctccagcacacagtgactttcaccctcaaatacagattgcagcaggcctttcccctgatacatcgaacctctgccttcgaccgcttgataaacatcataaagcgtaatgtcagccaaaggcttcgtcagggtaaaaccgcccttcgtccctggcaaggattctgccaaaccggcttgaactaatgttctcatcagcttcttcaagtaagacggagacacgcgcaatcgctggcttatagcctctgacgtcaaagaagcctgtacaggcagccttgacagtaacagcagcacagaaaccgcctgctccattcctgatttcattttcatcctattcactcccgattcattatggataactattatccataatgaatctcttagcagcttttgtcaataaaaaaagcaaaagaaacgattcatttcttttgcttagtatggttaacaaatctgcttcagttcctctatgtattgaagcgcttcgtcatattcttcatttgtatatttttgcttgcttttgatggtaaagactttttctttcttttcctcatcctcaagcccgtcaaagtaaaggatcgtggaaaccagctctaaaaaccgtgatgaacggctgtttacactgtcgatatagcctttcatatccggcatgtccagatcagcatggtctaaaaatgcggagcctgtctcagtcagcgaataccggtattgaaagtagccgccctttttttccttcacctcatgcagaaatccaaggttgcacagctcttcaatctggagcgtcagttcctccgaatacggtccataaaagtgaaaatcatatttctcatagaaaggaaactgcattttcttggcgatataaatcattttctgcagcttctttcgcccgatgatttctccagaatccgagaacaccttcatcagttttgcatgttctttcaacaaattcccgacatctcctttttccttctttccaatttctatgtcagtcccagcagctgccggattttcattttcgcttccggatgttcagagccgtcacaaatcaagtcctttggatagtacagcttgtggtccgtccgccgtttacctgagatggattccacaatagccgactgcctggacagctctttaatttggccgttttgcgtcaagagatggatcggcagacgctcctcttcctctcccggtcggtaaaaatcgtatggcagatctgatgaagaatcaacgaccaaataatagctcggatcgattcccgcctctttgaacaatgaagtcagctcaaaataagccgacatttcttcattcggattgaattcaacgtattggaacagctggcggttaatgaatctgcggcacaagtcggataaaatcgcgtcttcttcatcctcccaggcctggaagtaatacaaaataatagattcatccagctttacataatcctccagtgtcaatttcccttcaaaaatagaatagaaatgaaccggagcgtgagtgaagacatagccttcatcgtgcagctgcttcgccctgtgaagaatcttcgttaaaatgacctctgcacttctggtcacaggatggaagtagacctgccagtacatttggtaacggctcatgatatagtcttcgacagcgtgcattccgctttctttaatgacgatctgatcctcgcgcggccgcatcacccgaagaatccgctccatatcaaaatggccgtagctgacgcccgtataatatgcgtcgcgctgcaggtaatccatgcggtctgcgtcaatctgactcgaaatcaggctgaccacttgcttgtttttatatgttttggcaatgacttcagcaacatcctgagggaaacccgggctcacctttctgagcacctgattaacctccgtgtctcccaaaatgatacctcttgtaaaatcctcgtggtcaaggtgaaagaccttttcaaatgaatgcgagaacggcccgtgcccgaggtcatgaagcagcgccgcggccaaacagagttcgcgctcactgtcatcccattcagggcggcctttaaagacgtcatcaaccattcttctgacaatttcatagacaccgagagaatggttgaaccggctgtgctcagccccatggaacgtcaaataggtcgttccgagctgcttaattctgcggagacgctgaaattcacgggttccgatcaaatcccatatcagcttgtcccgaacatgaacatagcggtgcaccggatctttaaacactttttcttctgataattttccatttggatacgccatcgtcattccctcttttttttagccgtgtttctattatatcgactctattctttgaaaacatccttgaatttgcccggcgatttgttccatcttcatgaaaaacacatcttgtgaagcaaaaaagcctgacctgagggccgaggctaagaaaaaatatgtttttacttttttattttcttttttactttgtcaatcagctcatcctctgtcggagctgacagcgggcgattgttcacaaaagcaaatgattttttccgtccgggcccgcaataagattggcatcctacctcaacctttgcgtccgggtccacttctttcaaacgcggcagcaatgttttgatattagtggcttggcaatcatcacacactcgaaattcattagccatgacgtacgcttcccttcatttctatgttcatctatgtgaataacctaaaatcacgtttcaaaaaaaatcacatcactcttcattttacaaggattcgactgttcctgcaagccgctccatccttcgtatctcctattctttcagccaatttgtataaatattttccaacctggacattctaataccatgaaaagaaaaatgggagttgagataaatgacaaaacagcgacaagacgcttggtcagaggaaaacgatctgcttttagccgaaacagtgcttcggcatgtgagggagggcagcactcagctgaacgcctttgaagaagtcggcgataaattaaaccggacatccgcagcctgcggattcagatggaacgcagtggtccgccatcaatatgaaaaagcgcttcagcttgcgaagaaacaacgaaaacagcggatgagagcgctcggaaacgggcagcccgcgaaaaaaagattattatatcagcctcctgccgttgatcctgaaatcattcaagaaaccgctgcagaagagccggttaaaacggaaacaccttctgtcgaaaatgagcaacctttaatgtctggcgaacatatgccttttgttgatgaaagctttaaggaagagttagctagtctatcacacttattgtctcctcaaacgcctgcagctgcgcctgagatgacgatgaatgatgtgatccgcttcctgcagaattacaaaggcaataacgagcaatcatcagcattaaaaatggaaaacgagcgtttaaagaaagaaaatcaggaattgcaaaacaaaacagagcagctagaggcagaagttcaaaagcttgaaaaagaccaaaaaacgatccaagaagattatgaaaccttggtgaaaattatgaacagagccagaaagctagttttatttgaagaagatgaacatgcctctccgtccttcaaaatggaccggaacggcaatttagaaaaattagcggaatgacatagaaaaatcccaaaacgggcagctgttttgggattttcgccatgtgcaaaatccccttttctattgagaaaagagaatttcctcattttgcagccggatcagctattcttgtaaaatgaggccaagcttatgtgaatctattaagacatgtgagctgcctcggccgttttttgtttccgaggcgcagcagaaatgaccaaaagccccagcatcataagcgcaatgcccagccacgaggaaggcgaaagcatttcccctatgaaaaacacgccaagcaatgaagccgtcagcggttcagctaaagacagcgtgaccgccgccgaggccggaaccccggtaagccctttcgcaaacaaaaagtatgcggcacatgttgcaattaacccgatgtaaaggcttgttcccagtcctctaggggtcaatatccacgagatatctaactgccataatagcggcgtcagcaagatggcgctgatcatgaatacaacggcggaggtcgctcgcggaggctgggttttcatcatcgctttactgatgagcgtatagcctgcaaaagaagcacccgctccaagcgccataagaacaccagccacatcaatccgaacattggaactgtcggaaaacagaagccagcaacccgctaaagccagcacagtcgcaatccaccaagagtttcgcgggcgtttcttcaatacagcccattcgagggtcccggcaatgataggcgcactgccgatggcaatcacagttcccactgcaattcccgtttctttaaccgctgtgaaaaacagcggctggtaacacgccatacaaacagcggctaaaaatacgagcggccatgaccaatttttcacgtgaagctcccggctgatccaaaccgcaagcagcatggcgcttcctcctattaataacctgaacgctccaaatgccagcggtgtggcgctttctggagccaacgcctgaacggttcccgtagttccccagaaaaaagccgccatcaatacaaaaaggctgtaaatattccccttcatctgcctctcccctttaatatggatgctgatgtcattttatcgtttttctttttgtcgtggttatctgtatgtaagaaggatttatctgaaaataagattgtggggtaaaatgctgcttgaaataaaaaatgtatgccggcatatacagccggcatgcgaagaacgttcacccaaatacctttgcattccgctcagccatccggacgaggtttttctcaaattccatttcctcatcaatggacagtccagctgaataaagatgggtgcttaacgcttttaattccgtcaataaagcgaacattaagtcttgtacggagatgtctttttgcagaagctcacttaaggacgccatcgtttccggacgtatttccggatagacgccttttttatcgttttgcttgtctttcagcgccgcttgatagaatcgtctgatcaagtcggccctttcactgccgcttttatctgcacagagataaatttgaacagcgactccgccgcgaacgcgtctctgagagatgccggcgaactttttgccatttatactgaggtcatagctgccgggacaataagacccttcaatttcataggcttcgatctttgcgttgtacggtctcagcattcgtctcatcagctcgaccatcgcttcatatcctttgtctatatcgatgcctttcttttcgtcctcgaatatgagagagatatttaaaacaccgtcatccaatacgacggcaagaccgccggaattgcgtacgatcacacggtatccttcgctctccagcaaggagataccatcctgcaaaaacgggaggcgtgtatcctgtattccaaggacaattgtatcgtggtgcacccatgagcgcgctgtcgccggcgacacgccttttccgacggacatgcatagcgtatcatccattgcgaaggattgcttcgcatcaaataaagggccgagactggattggtcaatgactctccatttcggctgcatcagtaaatcaatcggttggtttgccatctatgtaaaaccctttcatgttaggcttattgaacgaaaactattatatcatttcagcagctgtgattgataattgcttttcagcatcgtaataaaaatttctttattttttgtattctccatgagaggagaatgaatgtaagacagcttgcgctttaacgagaaattattaatatgcagaattgaaatttcgcggtggatcaaatccttacgcagcacgcttctggatagaaccgaaagtcccatgccgttaatcaccgcttcctttacaccttgattgctgctgatggtaaacattgatttcggccgaagtccatttgaactgagtacatgatcgagatattctctcgtcccggagcctttctctcttgtcacccacgcttcgttctgcaaatcgctgatcgaaatctctttccgcccggcgagcggatgctgatttggagcggcaatgcacatttcatcctccatgaacggttcaatttccagctcattctcgtttgtatgtccttcaatcagcccgatatcagcctgaagcatacgcacacgctcgctgacctcctctgtattgccaatcatgacatcgaggttcagctctggatacagcttttgcagctgggccaatagcggcggaagaatatactcaccaattgtaaagcttgcagctattttcaattcgcccttcacatagtgatgatgcgcatagatttcagccttggcttgttcgtagagaaacaccatttgctttgctctttgatataaaatgtctcctgtcggcgttgtcgtaaagtgttttggcgacctgttcagaagagccgtttgaaattctttctcaagatttttgatatgcagactgacgctgggctgggagatcatcagcttttctgccgcttttgtgaagtttttttcttctaccaccgctataaacgttttcagcacgtcgtaatacaaaaaccccacccctgtcattaatgaaatatatggttatgattagttttctttattgtactcatatcatccgtcttggtaaagaaggctatacagaagcgcaaaaaaggcagccctcggtcgagagctgccatcgtcttcatttttattacagtgcttgcgccgctgtaattaatgcgagattgtaaacatcttcagcgttacatcctcttgaaaggtcgtttacaggcatatttaaaccttgcaggattggtcctacagcttcaaagttgcccaaacgctgagcgattttatagccgatgtttcctgcttcaaggcttgggaatacgaatacgttagcgtcccctttgatctcggaatccggcgcttttttctcagctacagatggaacaaatgcagcatcgaattggaattcgccgtcaagtgtcagttcaggcgctttttctttcgcgattttcactgcatccgctactttttctgtttcatcagattttgctgagccttttgtagagaagctgagcattgccacgcgaggctcaatgtcgaacatttttgccgtattggcactttcgatcgcaatctcggcaaggtcttggctgtcaggcgcaatgttgatcgcgcaatctgcgaatacgtattgctcttccccgcgagccatgatgaacacgcctgaagtctttttcacgccttcttttgttttgatgatttgaagagccgggcgtacagtgtcagctgtcgagtgagcagctccgcttacaagtccgtctgcaaggcctttatacaccagcattgtaccgaagtagttctcgtctaataacgctttgcgagcctgttcttctgtcgctttgcctttgcggcgttctacaaatgcttgtacaaggtcttccatgccttcatatgtatgaggatcataaatcttaacgccgtccagcgtaaggttcaattcttttgcttttgcttggatctcattttcattgccgatcacaatcggattcagcactttgtttcctgcaagcttgctgaccgcttctaaaatacgctcgtctaagccttcaggaaatacaattttaacgtcttttccagctactttttcttgcactgttgaaaataaatctgccacaataaaacctcctcaaaaagttacaaaaacgctttcttttactagcatactcttcttccaatcaaattcaaacagccaactttcattatagcgctttcataaaaaaatcttatttttctaactaatttaagtgactcaatcttcccttataggttcttctattttgatggagttatacggaagggatgttcaaggtttctccacagtagaatcggataaactatggtatagtgaaggcaatcatgaaaagataatgggagtgaagataaatgagtgaacagcaaatgacgaatgaagctgcaaaaacgcttgacggctggtatgcgcttcatgatttccgcacaatggattggacttcctggaagctgctgtccagtgatgagcgccaatctatcatacatgaattcaccgggttgcttgaaaaatggggcgtagcccaaaaagaaggaaaaggatcgcaaactctttacagcatcgtcggccaaaaagctgattttatgctgatgatccttcgtcctacaatggaagaattaaatcaaattgagcttgaattcaacaaatcaagacttgctgagttcaccattccggcatactcctacgtatcagtggtagagctgagcaactacttggcaagcggtgacggcgatccttatgaaaatccgcatgtgcgcgctcgcctttaccctgaactgccggaatcaaaatatgtatgcttctatccaatggataaaagaagatccggcaatgacaactggtatatgctttcaatggaagaacgcagaaacttgatgagaagccacggtttaatcggccgcagctatgcgggcaaagtcaaacagatcatcaccggctctgtcggctttgacgattacgagtggggcgttacattatttagcgatgatgtccttcaattcaagaagctagtgtacgaaatgcgttttgacgaagtcagcgctcgctatggcgaatttggttcattctttgtcggcaatcacctttcgcttgatacacttcctcaattcctatatgtataatatcccctcccgccctatccggcgggagtttttcaatcctcctttatcagaatttaaataaaatttgctattttcttcgttttttcttacgatgtagataataatccaattttttcaaaggggtgcagttatttgtcaaaacgaaccgcatttgttatgggagccagtcaagggatcgggaaagcaatcgctctgaaattagcagaccagcatttttccctcgtcattaattcgcgaaatttggataatattgaatctgtcaaagaagacattttggccaagcatcctgaggcgagcgtcattgtccttgcgggcgatatgtctgaccagcatacgagagcgggcatttttcaggaaatcgaatctcaatgcggacggcttgatgttctgattaataatatcccgggcggcgcgcctgatacatttgataactgcaatatagacgatatgacggccacgttcactcaaaagaccgttgcctatattgacgctatcaagcgtgcttcctcactgatgaaacaaaacgagtttggcagaatcatcaacattgtcggaaatctatggaaagaacccggcgccaacatgttcacaaacagtatgatgaatgccgctttaattaacgccagtaaaaatatttccatccagcttgctcctcacaacattactgtcaactgtctgaatcctggttttatcgctacagaccgttatcatcaatttgtggaaaatgtgatgaaaaagaacagcatatccaaacagaaagcagaggaacagattgcttccgggattccgatgaaacgggtcggatcagccgaagaaaccgcagcgctcgccgcgtttcttgcctctgaggaagcctcctacatcacgggacagcaaatttccgctgatggcggcagcatgaaaagcatataaaaacatcccgctttttagcgggatgtttcttgtaatgacccgaacggcaggttcagcttttgaatccgcgtgacaaattcccgcagatcctcctgcttcgacaccattgagattctgacatgcctttttccgttgcttccaaaaatttcgcccggtgtgactacgacatgggcatgctccagcaagtaatcggaaaattggtgagatgtctcaaacgtattcggaatttcagcccatacgtaaaaggttccttttggcttttccatcttccagcccaattccttttcgcaaagcgccgtaaaaaagtcaattcgttccttataaattcgtttcaacgattccgtatgctccggatctccagaaagcgccgcactcgctgcctgctgcagcccgccgaacatgccgacaaatacatgatcctgaaattcattgacggcctgaatgatcttttcgttcccaaccgcaaacgccattctccagccggccatgttaaatgtttttgaaaatgaataaagctctgctccgacaattttggcatcctctgcctcaagaaaactggccggtttttgatcgaattcaaacgctccgtatgcaaaatcatgaatcaaatggatgttatgctctttcgcaaaagcagcagctcttgcataaaaagccgcatcagccacagctccagtggggttgttcgggtagtttaaaaacataagcttcgctttttccagcacggctggatcaatcttttcaaaatccggcagatagccattttcttcatacagcggcatttcgtaaagctcagctcgcgccatcgtaatccctgataaatattcaggatagcctggattcgggactaaagcgatgtctcccggattgagcaggcattgtgtcagcacatacaatccggctttcccgcctccgaaaagcgcgacttccgtttcaggattgattgtcactccgtattcccttttatagaaagcagcgatcgcttcctttaaaaaaggatagcccctgaaagggccgtatccatgaaacgaaggattcagagaagcctcccgcaaagcctccacaatatgcggcggagtgggaaggtcagggttcccctgtccgagattaatgatatgggcccccgttttttccaattcctttaccttttgaaaaacgagagaaaactcctgccttggaagtgtcttgatgacatcggacggtgttatttccatctaaaagactcctttttgctccgttttgttatcccgttccaaaaacgatttgttgacgagcttcgtatgcagaaacaaaccgcatacgatcacgacaatcagccccataatgaccggagcgcttaggatgttaatgaacattgaaccaatagaaatgcataatccgatagacgcttcggccactgaaaaaatgcgcccttgaatctggtttgccgcattttcctgaaccttcacttttgcaagcacttccccgtattccatcgcgatgaaaaagaggatcgccgcgatgacagaaacagcgaaaatcggcgtgaataaaaacagcgccagtgagacaatggataaaacggtaaagtacgtcaggcctctattgttgttaaagccccatttgctgacaagcaccgctccgataaagccgccgaagccgatgcagaacgtgagaataaagttgccgatttccccgtcacccagaaagcggctgacaatcggaaaatagctgtacacaactccccacagcaaagccattgtaatcatcgtaaacatggcgtttaatacgaatgcattggttttgatttccttgagtccttccttaaaagactgaaaggcctctttaatgttttcagattgaatcggcacaaattgcagcttgatacggctgataaaaaatgccgaaaccaggtatgtcaaaccgttaaaggcaacagccagctctacagatccacctaacagaaagagccctccggcagccgccccgacgataatggagatggttgtcgcttttgcaaataacgtgttgatgcttttaatatctgattccaaggacgacatgacagcgagacgggcgggattaaaaaacacgccgcttccataagaaataaacagcagggccagaaaaatcagcggatactcgccttttggaagaaatgtgagccccaaaaagatgatgcctctgatgatatccgtccacagcatgatcttaattctgtctaaccggtcgaccagaacccccaaaaacggctgaaacaccatcggaatgcttctgaccacgatgaccccggacgtcacccaataatcgtgataatatgtagacaaaatgagcagggcagggagaacacaatagtctcccatgaacgatagcgcctgcccgtaaagcaagtatttagagttgggtttcagctgtttcatactggcagcacatactttgccgtcagctttgcatgctgctgaatttgtctgattgattcagccacatcctgtgaattactgcctttcagttcaaatgcagcaatggaattgaaagcttcaaacaatgtcaaatcaattgaagtgcctggtgctgcggccgaaaaagaaacgatttcagtatccccttttaaaagcccgtccggaatatcgatcgcttcaatgaccaaatcctcagcggtttctggaatctggccattttgtttgaaatgctgcgggtacaaatggcagtcggcgacatagtaaggctcttgatccaataatccgtccggcagatcggcatcttttccgaaacagaggacatctaataataattgcgccatatcaaggccgaaaacctttttaatgttagggatcatattccagccggcaaatctggctgccgattcaattaaacccggttctctgtttttcattagcttgacctctgtatgtgttgcgcaattttgcaggccaagcccttcatttgcctttttggcagcttcgacaattttcttttttgcctcttcatccagaatggacggcgtaatgtgggatgtctctgtaaacccgatttgcggcgttttatcatgaatggcgatcgggaaatactcaccgtcagccatgatgccttctatactgatatagtcggagtacccttctgtttgataccagtctccgtactcaccctgtaaaaattcttcagcgataaacggcgcttcaaacgtaaccgcctttggcacgttaattgatttcagatagtcattgactctgttaaattcatcttctgccgtctcagtgtccgtaatcagcgttacaccgatagaactcgctaagtatgtaggctttaagataagaggtgtgccgatctcttcaagagcagcacggaaatcttcaagagttgtgactcgtttgtttttgatcgatttgactccggccttattaaaagcgtccctcattttatttttatctctggcattttcggctgcctgcacgccggcacctctcaagcccagacgttcacaggctttcgccatcggagcaatgaataattcattgtttgttgtgatggcatccgccccaaacatttcggcaaccttgacgatttgctcgacgacctcttcctcaggcttgttatgatcctcatgcgcccaataaatggagtcaggatgctcaaaatcagctaaactcttaaaatagtctttatcttttacgaccgcgaccgagtatttttcaatcaatgctgcatgggaggctgtaattgcaaaaggtcttggaataaagctgaccaggttatatttttcagcagcgcttttataaaacatgtgcggcgggcagcctccaagatcagcgatgaccaatactgtttttctctccatatgtaaaacactccttctctattgtgcggtgtatcctccgtctgcggtgatggcgcttccggtcatatagcttgataaatccgaggctaaaaacagcatcacgtttgcgatttcttcaggtttcccaagcctcagcagcggatttaccttcgccttttcttttttgatctcttcaagtgtgccttcattattttcaaggaatgatttttcattcagcggtgtgtcgatgatccccgggcatacgcagttcacgcgaatgtgatgcttcgcataatcaacggccattgatttagtcagctgcaaaaccccgcctttgctggcgttataagcaggaatatcaggccatgccacgagtccgccgacagagcacgtattaatgatgttgcccttgccggcggccagcatatgcttgagtgcatgtttgctcattaaaaacatgccggtcaaattgacttgcagcaccttgttccaatcgctgagctccatctcgtgaataggcgccacgatttcgatgcctgcattattaatcaagacatcgagcccgccaaatgtatgaaccgccgattcaactgcgtgctggcaggcagcttcgtctgtgatgtccgtttgcacaaagtgcagcctgtcattattttcttttcgtaccattgcttctccctgcgcttcatcaatatccgccacaaccacattggcctgctggcccaaaaaagcctgaaccgcagcataaccaatgcctgatgcgcctccagttataaggacggttttatcggtgaggttcatgatcattcatccgccttcattttttttgcttttgctctgttgtagcgcggcgggaagaagatattaatcgattttgattctttttccgaacggttgatggcaccgtgatcttcacgaggctcacagaaataggctgtgccgaatttcatctcgactgtgcagccttcgaccgtcatgtcatagccgccgccgatgcagatgcctatttgttcattccgatgtttatggaaaggcatttctccgccatttccagggattttggcaagcataatttctacccaatcctcaacaaagaacgtgacttccatgcccggcagcaggtctcttgttttgaaaatatccaaaaagtagtcctcaggacttgtatatgtttcatcagctttcagccgcttgatatcaatagcaatcacttcttggtctgtgtcgtttcttgccccatgtggcacatgcggcggcgcgatataggcagattccaaggctgtcatttttcttgtcacatctccgacagtcatcatcagctcgccagaaacgaccatgccgatttggacctccttatgctgatggggttcaacattggtatgcggcgggacgtaagacattaatacttcagtatcccctcgtacggttgaatactgcctcactccgttttcccattcaattaatttcggtgtcgggaaataaagctcctgcatatcttctttagttttcatcatcaacgtctccttttccaaataatgaccagctcattggaatgcttttgaatgtttttacaaaggttagcccgtacttttgccgtgcaagctcattggttaaggcaatgtcatacaaaccttcttttacttttcttgcggcttgactggttgaattgactagtttgaaacgaacatctttgcgggtaaaatattttattaaattaataggtgaaggatgtgaaacaataacagatgtatcaagcatatcgtctctgaattcaaaatcaggacgaacagccaggccgtacatcggtgtatcgcacctgaagatctgcaatagctgcaaatccggcctcatgtagaaatgcttaatgccatcgtaagcatgtgggacgatggtatattccagcgggctttggagcgtcctttcgatgcatgattcaaaagtatcatgcaaggacaatttactgttcagcccttgtagaagagtaaaattggaaatgaaatgctttgctgcgtactcactgcttgtcccctcagggccgagcgtgttgactgtaatgagtttggatagtgaatcagttcttttttttgtctgaatgctattatccaatataatcatgagcaccaaccaatcttttaaaattttaagtaaattttatccagcggcaattgaactgtcaatgttttttgaaaatattgataattattcccatacaaacaaaaaaaccctttaaaaagggtttttaattataggaatttagaaactttgtttattgagataaggactgatcggccttctgctcaagcttgccgtactttttatatgcgaatatactgagcacaaatccgaggactgtgatggcggcgcaaatcaatccgacagctgcatagccgtatgccacatatacgggtcccattaaagcagaacctaatgtcacggccagattcgaggcgaggctgtaaaacaccatgacttttccgcgatgacgttctgagcagtcactcaaaatggtgctgagcagcgtcaccgtcaaactttgcattaatccccaaataaataggctgacgattaacagaaacattgacgccggcgcatatggtaaacacgccagcagaacgctgatgacccccagcgcaatcaaaagggagcgcatttttccgatgcggtcggctatctttcctgtaatcacactcatggaaaacccgattccataaatcatgataaataagcccgcagccgtgtttcctccggtaaaaacgtcctgaagataggtgcctaaaaaggaatacataccgtaaaaaccaatcatattacagaaggttatcgtgatataaacaggtacacgagggactttcagcgcatcccggaatgttcctgccggctcttctatttcttccttgccgctgtttttatgttgggcatggcggcgcatttcaaggagaatcagcaggacaactaaaacacccatcagggcgaaaatccaaaacgtccatctccaatgcaggacgccgccgataaatgatccgagcggcactccgaaaatcagcgccagcgaccagcttgaaacgatcagccccatcaccttgccccggtatgtataaggaacacgatcaccgacaactgcgtaagcggtcggaacaaacgctcccgcagccaatcccgaaagcgcccggcctaaaaagaagaaaaaaatattttgagccaaagcgcatatcaccgttcctatgataaagatcataagcccggctaataagctcagttctctggagtatttatcgcctaatggaaccaaaagcggcgcaccgataaaaatcataacgccgtaaatactgatagataatgcaaggacgctgacatctgagctgaaggcttttgctaaatccggcagcagcggtgagattacaagctcttcagatccggccgcaaatacccccatcgttaaagccagtgccaacaataacggaaaatgatgttttgttttgatgtcattgttttgattgctgttcattctttctcaaacacctcttccataatcttcttatcataaagttgtattatagtttagcattgttttttcactatttacaattcgaacgaaatatttataagttttattattttcatttaaatcccattatatatttctatatttcattctaaaaatacatgaggatgtaatgcgtaaaaaaagctctccggcctcccggagagctttttctattgtgcctctgtctgctttttttcaatcgtttcatgatttatacgctttttgatgcttagatgatagtatgcataacagaaaataatgatcggcacaccgcagtataagccaattctttgatccggaatgaaaataaggctgatcaacacgcagccatataaacaaaatccgagaatcgggactagcggataaagcggcgttctgaactccagatcattcacatttccgccttctgcaaggaaacgtctgcgaaagaaaaattgcgacgcacaaatggacatccacgcgacaactgtcaccatgcccgagattgagatacaccataaatacactgtttctgcggccatgacacttgtcagcagcgaacagcctgaaatgcctagcgtaatcagcagggcattcatcggcacgcctttttttgtcagtctggtgagaaaggatggacccatttgatttgatgaaagtgaccacatcatacgcgacgccgcatacaaccccgaattagcaacagataaaatggctgttaagatgacaaagttcatgatatctgccgaaaatgggatgccgatttgatcgagtaccgctacaaatgggctttcaatcacccccgccgttttgtacggaaggatggcaaccaagacgaacatagcgagcacaaagaaaaacagcgtgcgccaaatgacatttcgaatggactttggcagtgttttttccgggctttcactttcccctgccgcaatgccgacaagctccgttccctggaacgagaagttcaccatgaccagcgtaaacataacggccagcaccccattagggaaaagtcctctatcagtcataaagttagacaaaaagggtgtctcctgtccgcctttaaagtcaatcaagccaaacacagcggctccgccaatcacaataaataatatgatcgccgccactttgatgcttgaaaaccaaaattccatttctgcaaagcttctgacagagagcgcattaatcaaaaagatgacgatgccgaacacgaggcaccatatccagatcggaacggagggcagccacctttgcatcaaaatgcctgctgacgtcagctctaaccccactgtattcgcccagctgaaccaatacagccagccaatcataaagcctgtcgacggtcccagaaatttagtggcgtaggcctgaaacgatccggccaccggcatggcaacagccaattctcctaaacaaagcatgacgagatacattaaaaatccgccgatgatataagcggcaatggcgccgagcggtcccgcctggctaatggtaaagccagagcctagaaacagcccagtgccaatcacccctcccaaagcaatcataaacaaatgcctgcttttcatgctgcgctgcaattcatttttatgattctgcatcatccttccccctttggttcttttgccgtgatggtcatccggtagctttgcaaaagatgaacggtggtttgctgtatgaggagaggcaatacatgaaatgtgtacggtttatagactcgttctgtccatttatggccgtcttttccgtacacgcccatattaatggatggaatattcagcttgcgtatgtctttgaacggaatggtcccaatcatattccacccagggaagttcctgataaaagaatcaatttcgccatcggtttcgtgcagtgataaaaaactgccgtctgccaagtaggggaaaaactttttgaagacaaatgtttcgcctgtcgattcagcggttttgtcagccgcttcttttatcacatgctgcaaaagctgatctcttgcgctatcttctttcaaatagttatgcggcaggtaaggaggtgcgtaaaatagaatgacttttgcgccttgatcggggtcaagcttttgaagctcttcgattgcctgaaagcatctcatgcgaagttcaaggtgctcgttggctttgaatgtctgctcgatacactgctcgggatctatcccccggtttctcagcttttctaagtattgctccaggctatacacttgaatgtcccatgataaatgtttctttggcaggttggctctttttgcatattcttcataataatctgataatttttgttctgtctctcggcatgcttcctcagtgacttcaataagcaaatccatcatttcttttgctgttctttcataaataaaacaattgaagtacaagctggtgctgacagccgtttgcacattataggattccttgttatcacgctgatacaaacaggatgggggcagaaccaactccccttcaaccttttctgccagatggatgttattgtggagacggcttgtgatttcagatgaaatgaaatttgggtcaattcctgccagtgtatcgccaacatggacttcacgcccgtaaatgtaaaagcaaggcaacagttttcccgcggctccggtatagatatatcttgtctgatcaccatcgtaaagcggggtaataaaatccgtattaatagcagccaaatagtgaagctgtttttctttttttagccggttcagctctgaaatgctggcaagaatgcccgaatgctggctctcctcatcgggattggccataaacaatacatttcccggcaacgtctcaaggttctccgaaaaatgcaggagattggctaaatgcacggcgatgccgctttgcatatcaacagatcctcttccgaacatccaatcgcctgatttggcatcccgctgaacatcctgatcgaactcatagcggctgaaatactcggccaatttctcacaatcaaaagcgatatcctttaaagggccgaaatcttcaattccaactgtatccagatgggcatggtaaatgactgtatttcggctttctccatgtcctttaataaacgcaaaaatatttttgcgattgtatgggtcattgggaatggcctgttcccacacatgactggggttttcctgaaaataaggatagctcgtgatcacttctttgatgaaatctgcttttgtcccttctccaacggtgccgttcacgctgctgaggctgaccagagatgctgtcagcgcctccactctttcagccggattcatgtgactgatttttgtatactgcataaattgtcctcctgattaaaaagttgaaatcgtgcgatccgctaaagaatcgcacgattttatttctctcaaatcaaaaagcttcggacgttgttttggcttgcatatgaagaattaagtaatcgggaccgcctgcttttgagtctgttccggacatattaaaaccgccgaacggctgatagccgacaattgctccggtacatcctctgttaaaatataggtttccgacatggaaatcctcacgcgcccgttcaatgtgcgcacggtttttcgtcagaagcgcacctgttaatccgtattccgtgttattggcaatctccagcatatgatcgaaatcacgcgctttgcaaatcgcaacaaccgggccgaaaatttcttcctgcatcaagcgggcgttttcatcaacatctgcaaagatcgtcggctgaataaagtagccttttgaatcatcgccttctccgccggccaatagcttgccttcagatttgccgatttcaatgtatttcatcactttgttgtaggatgcttcatgaatcacgggacccatatacgtatcaggatcttctggattgccgacagtcagcgttttggtcagcgccacagctttttccaccacttcatcataaacatcctgatgaatgaccgcgcgggagccagcagaacacttttgtcctgaatatccaaatgctgagtacacgatagaggatgcagcaaggtcaagatcagcgtccttgtcgacaagcactgtgtcttttccgcccatttctgcaattacccgtttgagccatttttggcccggctgcactttggcggctcgctcataaatccggcagccgactgcacgggaacctgtaaatgagacaaaccgtgttttcggatgctcaactaagaaatcaccgatctccgctccatctcccggaatgtaattcagaacgccgtttggcagacccgcttcctccatgacctcgacaaattttgctgccactaccggggctgcgtcagccggttttaagagaatcgtatttcctgtcacaatcgctgccgccgctgttcccgccataatcgcaagcgggaagttaaatggagaaatgacgatgccgacgccaagcgcttcgtaatgatattgattgaactcgccagcacggctcttcaccggagccccttccttgagctttaacatttggcgcgcgtagaactctaaaaagtctatcgcttcagccgtgtccgcatccgcttccttccacggttttcccgcttccttcacaagatagcttgaaaattcatgctttcttctgcgcaaaatagccgctgccttaaagagaatattcgcgcggtgctccggtctttgttttttccaggaatcaaatgcctgcaatgcggcttgcatcgctttttcagcaagctcttgatccgctgtagacgcgtacccaatgatctcttctttatttgccgggttaatggaaatgattttgcggtccgtttcaattttttctccatttatgacaagcggataatgcttgccgagctgagtgtttacaaaggccagtgactccccaaatgcagttttattctttgcttccgtaaaatcggtaaatggttcgtgtgcgtatgtgactgtcatatgtagtccccctcgtgttatgaaatatatcttcgcatatgaataaaaatgcaagaatcatgccattttcttgtcttttgctgaaaaaacttgttgaatcgaacagaaatttgtctaacaggtgatcatctttctctatttccgatcttgaacgcaaatttattttgcgatttttgctctttaggcaaaaaacaaatgcaaaattattttgcggaggcttctcaaattagacccatccgcggaatcgcgatgcttctgccgattttctgatgcccgtcatgtaagccgccaaacgcatatccactttatgtgttgccgctgtctgataaattgtttcgaacgagctgaccatgacgcttctcaatttttctgcaacctcttcttccgaccaataatatccttggttgttttgcacccattcaaaataagaaaccgtgacgccgccggcactcgccaggatatccggcacaagcagcacgcctctttcattcaggatcttagtggcatcaatggttgtcggtccgttcgccgcttcaacgacgattgacgcctgaatgttatgtgcgtttttggctgtgatttgattggagatcgcggcaggcactaaaatatcgcaatccttttcaagcagctcctcatttgtgatgacgtcagtaaataaattggtgaccataccgaagctgtcccgtttatcgagcaaataagggatatcaaggccgtctgggttgtagagcccgccattggcatcagaaatcccgatcaccttcgcgcccgcatcgtgcatgaatttggccaggaagctacccgcgtttccaaagccctgtatgatgatgcgcgcgttttgcagcttgatcccttttttcttcaccgcctcttcaatacaaatcgtgacgccctgtgccgtcgccgtttcccgtccttgcgatcctcccaaaacaagcggtttacctgtaataaagcccggagaatcgaattcccgcagccggctatactcatccatcatccacgccataatctgcgaattggtgtatacatctggagctggaatatcctttgtcggaccgacgatctggctgatggcacggacataccccctgctcagcctttccagttctccaaatgacattgtccgcggatcacaaataataccgcccttcccgccgccgtaaggaagattggcaatcccgcatttgagcgtcatccaaatggataatgcctttacttcctcttcattaacttctggatggaagcgaacgcccccctttgtcggaccgacagcatcattgtgctgtgaccggtagcctgtgaacactttgacgctcccattgtccattttgaccggaatgcggacagtgagcattctctgcggctctttcatgagttcatacatatctcccggataacccagcttccgaagggcttccttaatgattgtttgggtagacagaaataagttaagagcttctttttcttcatctttcgagacttgctttgctgacatctttttcacctcattgtttttttggccggctgtaatgtaaacgctttaaaaaatcagcccgccaattcctttctgcattggattcacccttatcatcatgcaagatccgtaccagcttttgaatccacaaaaaaagagactgaaaacatctcagtctctgactacaaatctatcgattaacggggatcaatcaccagctgcgtttcagcataaaaactgccgattcccaaaccgtttactacatcgcctttaatcgtgtaagtgcctgcgcgaggaagagttttacgcaccatgacaaggtcaaattcggatgcgcctaacaaatcaagcgtaagcggaagtctgactgtttttccatcgtttaaaatctgtgtttctttcagtgttcttccattcactgaatctcttgtcgtagcatgaaacccgtcaggaaattgaaattctaccgctccaagagaaagcaccgcatttggtttatatgtcacttcaatatcagaagtggtccactctttcgtgctgttaactgtttttgcctcgattgatgcagactgtgcatgagcttggcccgaaggaagtaagattgatagtaaaacagctgaactgatgaataatgaagatacgaatgaagttctttttagcatgacatttccccctaattgattgttgaaatttggccagagcgtcctctgcagaaaaagcgctttttcataattcgcgaattaccagttctttttcttaaaaattaatctatcatcattttccatggaagtaaatgttttttaaggaatattaacacttggaattcaatgagaattccttcctgtttatacaaggttcaaatggacgattctcctctctttttctagtaaaatctgcctgacattttatatcttttatcctattttaaaaaagggcaaaaaaagtcgaagatgcctctgctcttcgattgatcacgttcctatttttatctgaattcagtgttccagttaaaaccgatcgtctcatcatcccacggaattcttttttcatcaggctgatccgggttatacgacatggtggtaaaatagataattgtcagcggcgtctctcccagcactctatatccgtgagccaccccttttgggattaataacagcatcgggttgtcttcgcccatataatagacgtccgtttctccttttgtctttgaatcctctcgaagatcgtataggacaacctgagcgtggccggttgggaagaaccagagatcatcctgcttctcatgataatgaaatgccttaatcacacccggatagcttttcgaccaagaggcctgcccaaaatgctcaaggaggttctcatcgtcccggaccagctcagcaaaaaagcctctgtcatcgctatgcttcatcaattttttcaccttgactccatcaatcacacgcactgctcctttcctgcaaatactctcgtaacgcttcccgccagtggcgggggcggatgtcggcttcttcaatagcccgatggctcagcacagagtatgccggacggggcgttttgttcccgtattcctctgtcgttacaggcaaaatggctgtttccagcccgctttcttccataattgccgtcgcaaactcataccagctgcatatgcctgaattgctgacatgatagatgcccggcggatggctgaacagtttgatgaccgcttctgctaaatccttcgtataagtcggcgaaccaatttgatcgctgacaacccgaagctcttgtttcgtttcagcaagcttcagcatggtttcaacgaaattactgccgccatgtccgtacacccacgatgttctgatgatcgtgctgtcttttgtcgttaatcgtatcagttcttctccgagccttttgcttttgccataaatggttttcggatcgaggggatcatcttccctatatggctgggttcctttcccattgaatacatagtccgtgctgatatgaacatattgagctccgatgcgggttgactcaagcgctgtataataagcgccgattccgttaatcaagtacgctttatcaagctctttctcgcattgatcaaccgacgtaaacgcggcgctattgaccacgatatccggctgataatggccaaacgaatgccgtactgagcgctggtcagcaatgttcatcatcttctttgttaacgcaatgacctcatatccggcttgcttcagctggcggcatagttccaagccaagctgtcctcccgccccagtcaccaatacctttgtcaatcagatcaccttctcatcggtcattgtctgtataccactgaatcgtacgcgcaatgccttcttcaaacgtcacttcctgccgccagcccagttcatttttcagcttagatgcattgatcgcatagcgccggtcatgcccttttcggtcttccacgtgggcgaacaattcctcacagcccagatgcttcaaaatggcactcgccagctctttattcgtgcgttcatttccgccgccgatgttatacacctcgccgtcggtccctttttctaaaatcagcttgatcgcgcggcaatgatcctccgcaaacagccagtctcggatctggagtccatcgccatacagcggaacaggcaggccctgcttcgcatgacggataatcgtcggaatcattttttcgctgtgctgataaggtccgtaattgttgctgcatcgtgtaatgatggccggaagcttgtgggttttcacataagacaacacgagcaaatcagagcttgctttgctggctgagtatgggttattaggagaaagcggcgtcgtttctgtaaacgcgggatcatccgcttttaaatccccgtatacctcatctgttgaaatatgaatcagcttcttggcttttcctttcaagaccgcttccgccaatcggtatgtccccatgacatttgtggtgataaacggctctgcttgggaaatgcttctgtccacatgcgattctgctgcgaagtgaatgacgccatcgtaggtctcatcaaacgcgcggtcgatatcctcctgaacgctgatgtccccttttacaaagcgaaaacggctgttttgctttaatttttccatttcctccgggtggctggcgtacgtcagtttatctaaaacggtaatgcgcgcatccgtttccctcagcatgagctttgtaaacgtgagcccgatgaagccggcaccgcctgtaattaaatatgattttgccatcacttttcgtcctgtcctttccgtaaagcctggtgtacaagctgggaagcgagataaagcgattcgtgagttccggcatctacccaccagcctgataacacatcatacgtaagctggctgttttcgatgtatagattattcacatcggtgatttccagctcgccgcgctttgatggtgatatttgttcaatatatgaaaacacctctgcatcatacatataaataccggtaacacaaaggttggtcggtggctgttcgggcttttcgatgatggaacgaatccgcttgtttttctcatcaatctcagcaatcccgaagcgttccgggtcatcaacttctttcagaagcacttttgctcctttcccctgctgttcaaagcgttctgtataaggctttaatgaatcttcaaatatattatcacctaataataaaatgaaagactcttttttcgtaaagcgctttgcataagacagcccatccgaaatgcccgatgctgccggctgtacttgataagtgatagtaacgccaagctcttccccgttcccaagcagtttgtaaaattgcggcatatgctccttttggctgatgagtaaaatgtcttttattccggcttcctccagcttcataatcgaccagtatatcatcggatacgggcctacaggaagcaaatgcttgttgacggctttcgttaagggcataaggcgtgagccgtttcctccggctaaaataacacctttcacattaacacttccttacatgcatttttatatctcttgttcatataaatcttgaagaatagctgttacccgtataatgcctttgccatccacgagcggccttcctcccttgtgcaaagaaaggcgaagaggatagctgctcataatgcgtgacatctgatagatgagtgtttcatccggtacaagctcacccaagccaagatcaagagcggcgccttggtcagcaaatgttttggctgttgccgtttgatgcccaacctgagaaagaacaaggcacggcacgccgatgcaaatggcttcatatagagagatgccgccggcgacaatggctgcgtccgcttgtttcatcaaacccgccatatcatttgtctgttcgatcaccttgtactgcggcttcttttcgatccgccttcggactgcctcttgatgcggtgaagcgctccccatcacaaaaatcatgtttttgtcttttatgccggggacttgatcagcggcagccagcactttaaaaataagctgcttcggatcacttcctcctaatgcaacaaggatattgcggcagtctttcttaagtgtgtaatcctctcttgcggcctgaaaggcggggtgaagaataagatagtccggaccttcataaatgcgtgtgtttccctgaacgtacaccctgcttctgatgtcaccgtaaattccgttaatgactgcgtcactatattgaattgatttaccgtttttctcttcaaaaagaacaattttcgcatctgtctccgtctttattttctttaacagctctgcaggcgcgcctagaatatcaaacaaaagcaaatcaagcttcttgctttttatttcccggagaataaattcgtgctgctgcagctccggctttacgatgacacgccaatgctcttcatgaagaaacgcttcagactcctgattcgtataaaacgtaatcaaacatcgctgtttgagcccctccgcaagtctcttcatccggacaacatggcccattcccttttcatagccgccgtctgcgaagatcccaacacgcatggctattcagcctctcgttcgattgccgcatcggggttccggttcagaagggtgataagctctgaggcggatacaccagggcgctcgcctgctttttgatagagggcctttatcgattcatagtcttcctttgtatcaatggtcagccgatattgaggggcgcgaaatcgttccggcgcctctaaaaactgaacacgataaagagctggatgattccttatatataacgtgacatgctcctgatattgatcctccatattctgaatacggctgatgtcaattaataggttggcgttgaccacttcgccgcaaatccctaatggggcattcaggatatacgtataatccgatccttgatcaaaatgcgccttaatcattacatcgagcagctccggatcgacaaacggattatcacccgttaaccggatgatgactgacggtttaacagcttctatgaccttcacaaacctatcgaggacacgttcttcgctcccgcggaaaacacgaaagccttgtttgatacagtgcgcctctaatatgtcgtcagtttctttgtcagacgtggcgatgacaagattatcccgatccttttggtaaaacgcgcttttccggacacggtgaacgagaatgtcaagtaaacgattcgatccgagcggccgaagcacttttcccggaagccttgttgaacccattcttgcttgaatgataaagagaatatcattcatgaaacgggctgtccttcagtaaaatgtcatcccagacaatgcctgtgtcggctggaatgtctcttacagcccgaacaccgctggtcagcagttcaaaaaatctcgggtgcagcccctgcggcttttgtccgggccgaagcactgcgatattgtcttcactaaaggcttcacctttttgaatcggagctgttgtaaaaatgcctctgtatgcaaaatttctgatttctccttcgatggaggttgttgttttgtatgaactgccaagcagtttttcagagaccggctttgtgatcccctgtttcagctcagcttccgttttcctgatgccatcgaccatttctttcaattcatccggatttaatgcaaacgagtggtcggcacccggcagatctttatcgatcgtaaaatgcttttctatcagttttgctccgagccgaaccgcggcacacggcgcttctgtcggatgctcgctatgatcggagaagccgattactgcctcaggaaaagcggcggcaagcatcggaatgacgctgaggttgctgtactccggcggtgctgggtatttcgccacacaatgcattatggcaatttgattgtttccctctgccctgatggtgcgccaagcttcgtgaacatcagagatttcagctccggctgtcgagaaaatcatcggcctgttcagccgggcgacatatttgagcagcgggagatggttaatttcataggatgcgattttaaaagcgctcggcgaggtagactgaagcagatcagctgacccctcgtcacataccgtacttaaaaagatcacctgcttttcgcggcagtaatccaatagcggtaaaatccactcagcgggcatttccatagattgaaccaaagaaaaaatagagacgtccttgcccgctgccgtcttgtacaaaccaggatctttctggtacatcctatcagcttggaacatttgaaatttcacggcatccgctcccgcttccgccgcggcgtctatcagcgcaaaagcctgatcaagcttcccgtcatgattaatccccgcctcagcaataataaaaacaggagcgtctttgcctacagttttattcgcgatctgaaacgctgccattatttcgcctccttgcccggccaaatatgataatagtaatacgattgttcagcggtgaagcccattcgttcataaaggcggatcgcccttacattgtgaagctgcgtccccgctgttaccgttctatgcttctgggtctccggttgttctatgagattcgccaataaatgaaatgcaatacgttttccttcaaatcccggctttacagccatcaaatcgagaatgcattcatcatctcttgataagccctgaagatagccgatgacctcgccattgtgtttagcgacaatattgaccgccgcccttccattcagattgtttcgtgtccactcctgaaatattttgtttgctgcatcgcggctgagatgaggatcctgaaaatatctgctttttgtaaacgagtctcgggccagctcacatatcgcttctgtgtccccgggctcaggcgggcccagttcaaaaaatggcggtgttttgtcataaaaagacggaggcatcgccagcttcagcaaactcccgacaaagtaagaggatggctgctgctgtatcacatgcgcggctccgatatcttcagccggaacgcggacaaagataaaatccgtttcatccatttggcgtacagtataaaaagcttcaaacagcctctttagctgcccggtactatttgccgcaagaagtttgacgttgatgactttcttctgaagcaccttgctttcccacaaagaatcttcgtaaagcaatacgccttggagcctgctgttttcaaaaaggccgagggaaaattgatacggaacatccagtgtaagctttctgctttggagaaattcctcaattgcctctttggagacattttcttttaccgtatacacttaatcagccccttttacgatatcccgcacagcttcaatgacatcatctacatcgtcgtcagacattgatggatagagcgggagagaaagggttcgtttatagtaattcatggcattcggaaagtccgcttccttatatccaaattgcttttgataatacggatgaatgtgtactggaataaaatgaacgctagtgccgatattgtatttatcctttaaagccgtaatcatttcgctgcgcgtaaccccggcttttttttcatcaacttgcagaacatatagatgccaggcgtgcctgccgtcatcatggacaaacggcgtgatcagcccaggaatctgctgaaaagcggtttgatagcggccggcaatctcttctctccgtttctgcatatcatccagccgtttcagctgatgaagtccgagggccgcctgcaaatcaaacatattcatcttatagccgggcgattcgacttcatagtaccagctgccatttgaagaataacggttccatgcggctttactcatgccgtgaaggcttagcacccggatcttatcggcaagctcctcatcatcagtcgtcagcatgccgccttcccctgtcgcgaggtttttggtggcgtaaaagctgaatgccgttgcatccccgatagaaccgatcattctttgcttataagtcgtatataccgcatgtgccgcatcctccagcacgaataaaccatgattttgggcaacagccaatattgcatccatatcgcaggactgcccgccaaagtggacgggcacaactgctttcgttcgcggtgtgacggccgcctcaagctttaccgggtcaatattgagcgtgttttcgtcaatatccgcaaacacaggcgtcgctcccgtatgaataatcgtattggcggtcgagctgaacgtaagcggagaggtaatgacctcgtccccgggcccgatcccttttgctttcaaagccaaaaataaagctgcggtacatgaattcaccgccacggcgtgcttcgccccgacaaacgcggcaaactctttttcaaactgctgaaccttcgggcctttagaaagccatcccgattcaagcgtttctgtaacctcctgaatttcttccttaccgattaacggcaatgagtaagggagaaaatgatttctcttttgcaccatttctttgcgctcctatcattttattcagtatcttcccgcctgtaatcaacccctgttttggctttcagttccgcaaataaagcatttgttgattctgccaccggataattagccgctatgaatgccaggcgcgcctcttctgctttttgatgcacgtcgggacttcgaagaacttcaaccaaggtgtgcaccagttcatccggctggtcaaacataaaatcgccaagagactcataatacggatacgagcgatttccggacgattttccgatcagcacaggcttttgaaacagcatggcttcaagaccgactgtcgaggtctgcgtcactgcggcatcagcatacggcagcaaatcataaagctccagctcctttttgatgactctgcatgctttatgttttttcgccgcctcgtgatacagatcaagcttgttttttccgatttcccacgggtggggtttgataatgatctgcagctgcttctgatcagaaagcccctgcagcacaccggaataaaagtcttctgaaaagggctgagtggcaatgagcacaatttttttagtcggctgaaaagcaagttttcgatagaatatggacatatccataggcgttctgttaaaaatctgatcgaagcggggatgtcccgttacgagaatctgctcgggtttacagccttttcgtatgaaccactctgcttcatacgcaccaaaaacagcttgataggttgtaaaaacaggaatgaaggcttcatctcccatcaatgcgccatgctgaagacaaatgctgacggccccttttctttgacacatgagagcgagcaccctgctgtaaatgtcttctgccgttccgacaataacagctgaaatcttttcctgttcaaacagcgcatcaactgtatcaatggcctctataaataaaggaatatctttgaaaagccggtcgcgaaacgcttgatcaccaaatgccgggtgatcatcataaggggcgagaagcgaacaggctgtttcgagatactgcttcgaatcgcctttttggcatgaatccgcaatctcccgcttgctaattacaggcagatcacaataatgcggcaaactccatctggccaaaacagccgttttttcaggatcaaattgatagtaatttccgtttgaaaaacgcaggtaatcaaagtgcaaaatgactttccctttaacaggtttgtcatttgttttaacgattttttggattctttcttcaaaaaacggctgaatctgtccctcatcgatatgctgatccaccgatccgaataattccggttcttcttccatcatcaccctcagctcagggctgatgtattgataaaaattactgataagcccaagcggaatccctttgtagcgaagtttgtcaaaaagctccacgtacttccggtacagcacccaataattgcttaaataggccgacaagctctcaccccattccaagcttttttaatgattcacgcagctctcggcaatttcgctgcggaggaaggttcctgacaaattcatttttttctgattcaaacagctgaaagtgaatcgattggtcggtaatataattcaggtccagctcctcatccagtgggtaaaacggataaaaatgattgactctccaaaagaaccgcgcatctcctatacggtaaaacgccgggctttcatcccaataggagccaaacttctcctttaccttctcaagcaccgaatacctgtgcatcaccgagcaatgatcaattgcgcacggtgcgttccatgtcacttgagcggcaggcctgacagtttcttttacaatgtcgcgattctcgtttaaatgataggttttggaggctgagtaaatcacagccttttcaggatgggtatcgagctcccgcaccattttcaggaggcggtccggcatatagatgttgtcatccgtcgcataggtgatatattcaccctccgccatctcaatcgcctgattgatcagtgccgcgtatctcgttttttctgttctttccttcactccagatatatcgctttgataaaaacgcactcggttatcattcaaaaaaggacggattacattcagcgtctcttcattggagttgtcatccataataaacaattcaaaatctgaaaatgtttgtgagagtatgctagaaatggactttgccacataatcgcttttgttatagctcgtcataatgactgatactttaggcaaatcctacacctccttcttggaacttcacacctgaaactatcgttatcttatgttgcttatgctcaagttgcgctagggatacaaaccaatatgcgaaaagtttgtgtatgtctctgaaaaacagcggctgcccagagcgaaatctgatcggtccgctgttctttttcagcataatccaagcatcagcctcataaggtgaaagagataaaaatcgcaccagcgactaagatcgttttccatcggaggtgagtcatcgcggagcgttcacctatacatccagaacatgttttgaatggttttcataaaaaggaggaacgatatgaaaccgaaaaaaaatcaatatcagcaaatgcaggcatttgataatatgcaggggtatcagcctcagtttggcgccaacccgtacccgcagcaaggccaaggctcacaaatgcagccaatggggatgcagccaatgatgccaatgcagcagggacagcaaggacaacaaggacagcagggatttggattcccgggccagcagcagggcggcggttttcaaattccatcggggcctacaccgtcaggaccgggccaaagcgttcccggcatgctgcctgttgaggaatcttacatcgagaatattttgcgcctgaatcggggaaaaacggccaccatttatatgacatttgaaaacagcaaggaatggggctcgaagatttttcgcggcgtcatcgaagctgcgggccgggatcacattattatcagcgacccgaaatcaggaacacgctacctgctcctgacaatctacctcgattacattacatttgatgaagaaattgcttatacgtatccatattccatggcgtcctattcgccaagataagaaaaaagccaatcactcatatgatgaggattggcttttttgattatagatatttgacggctgcgacaacgatcataatccaagaaataataaacgccacaccgccgagcggggtgatcgctccaagaatggagatttgcgtcacacttagaatatataagcttccggaaaacagcacaattcccgcaaacatcagccagccggctgtcgtgacactgcctatgccggataatttatcagccagaaacgcgacaacgaataacccaagggcgtgatacatatgatactgcacgcctgtgtgccaaacctgaagatatttatcaggtattttcccttctaatccgtgagcgccgaatgctccgagtcccacggcaagcagggcgttaatagcccctaatatgataaaaactttcatctatctctcccgccttttcgttaaactcatatcatttatcttatcgcacctgcaccaaaattcaatgtttgttctccgttgacacgagattgtcggattttctcctgcgccaaagctggaactggtcagctgctattgcagcaagcgtccctaatacgagcccgttgcttaatagagaaataaataccggatgcaatccctttaacgcagtttcaggaacaaacatgataccgacccctgtcagcagtgagatgccgatgatagacctcaccctttttgattcttctttctcatacgaatcaaattcggcaaaggccagaccgcccattgcggagaacacaacaaaattcaccgcaaatccaacgggtgacggcaggctcgcaaacgtattcataaaaaacgggatcacgctgattacgataaccagaatactgccgagtataaacggttttttagaaggcatcttggtcgtttcaataaaacctgcggctcccgaaatcggaacaggcgcaatagctcccgtcaaaccgctaagcagatggctgaatgaagctgcaaaaccggcatggcgttcatgatgctttccatcaggctgtttgctgaattttttcacggcgatgtccacgaccttcatgctcgccagcatattcacgatcagcaagatggtaataaaaatagaagtgatgatcaggccgctgttaaataacggtggcccaaaaggaaacagggaaggcagctgaaacagccggtccggcatttcaatcggctttgccgctccggcagccgcaaacagcacccacccgccgaacaaggctaataaaatagaatattgcttaaaaaacacgatgttcgaatttgtcattataaaggcggcagcgatcacaacaagcgccaggccaaatacaagaccgtccaccccgtcctgtcgataaccgattccgagaattccttttataatgggctgactcagctgcatgacaagaagcaataaatagacgcccgttacaaccggagtaaacaattttgcaagtctgtcaatgaccttgaaaacacttaacaaaaagaaacatacagcgcttacaagaagagctccctgcaacccccgcagtgtgtctccatatgtcgcaaacacagttcccgttagccctgcgtagatcgtatacactccccaccacaagccggctgggctttcattgatcggcagtctgtggcctttcaaacactgaatgacggcggcaatccccagtacaaaaaaagtgctttgaatcaatctcgcagaatctgagtgatccagatgaaacgactgggcaaccgccaccggaacaactatcgccgcagcaatgataaacgctgtccattgcaacgcgccaagaaccaatttcacgtaagctcaacctctctctttaaaaatcaaataaagactctccgtttccatcctcttcctgcttctctttttcttgctttcgatatttgtttaatcccgcgctccccatcattttttccatcatcagctggtctgtcgatggcggcgcggcaggacttggcgtaacgctcggctgtatgcggggcgcgctcgcgttctccggctgatcaagcacgacatcacacagagaacggacaaccgctacataacgcttcagctcctcatcccgttcagctgtttttgcttttttcagctcctcttccatcttttgaattaatgcagatatatgaatgttcatgaagcaccctccaaaaaaataaatgttgtcttcctgcattttatcaaattcctgctgtaaacgcagatatgagtttgttattttttctgacaaaccttgcgcgattgacaagcagaagagatttttcacataataaatcaccatacattacaaaaaggagaaacggaatgaacagcatcccctctatcatcagcaagcataaagcctattttgcggcgggacatacgagaccgcttgaatcgagactgaacattttgcgaaagctgaaacaagccgtcagaactcatgaagccgatctcatagccgctctctaccaggatctccacaaatccgagcaagaagcatactcaacagaaatcggaatcgtcttggaggaaatcagctttgtcatgaaacggctgaaaaaatggtccaagccgaaacgagtcaaaacgccgctgactcatctaggctccaaaagcatcatcattcctgagccgtatggaaccgttttggtgattgcaccttggaactatcccttgcagctggcgctttctccgttgattggagccattgcggcggggaacacggtcgttctcaagccatcagaatatacgccggctgtttctgctattctttccaaactcatcagcagcgtttttccgaccgattatgtcgctatggcagaaggcgggcccgatgtcagcacagcattattacagcagccctttgactacattttctttaccggcagcgtagccgtgggaaaagtcgtcatggaggccgccgccaaacaattaattcccgtaaccttggagctcggcggcaaaagcccctgcatcgtccataaagatgctgacattcagcttgccgccaaacgcatcgtcttcgggaaatttacaaatgcgggacaaacctgcatcgcaccggattatttatttgtccacgaggacatcaaaacgaagctcacagaagaaatgaaccgtgcgatcagagaattttacggccctcagccggaacggaatccgcagtacggcaaaatcgtcagtgaacggcactatcagcggctgctcagctttctgaatgacggcatcccactcacaggcggacaatctgatcccaatcatcacaaaattgcgccgaccattctcgaacaagtgagagatgactctccagtgatgcaggaggagattttcgggccgattcttccgctctttacataccgcaatatcggggaagtcattgagaaagtccaatcgcgccctaagccgctcgccctgtatctcttcaccacaaacaaagaaattgagcgcgctgttttaggaaatctgtcgtttggcgggggctgtgtcaatgatacgttaatgcatgttgcgacgccgtatttgccattcggcggcgtcggggaaagcggcatcggcagctatcacgggtttgacagttttaacacattcacgcacaaaaaaagcgtcgtcaaacaaacgaaccgtttcgacttcgcatttcgttatccttcctccaaaaacgggctgcgaatgattcgaaaaatactcaaataaaaaagcgcagataacctgcgctttttacaaatccttaatacaccaatcaatcggcgcctctcccattttctccaaataggcattcgcccgggaaaacggtctgctcccgaaaaatccgtttctcgcagaaaacgggctgggatgcgtcgattcaatgataaaatgcttggacgtgtcgatccgttcttttttcatttgggcatgccgtccccacaaaataaaaataaccggccgctccctttcattcagcacgtcgataatccggtctgtcagtcgctcccagcctttccccttatgggaattcgcctgtccgcgccttactgtcagcacagtattcagcaaaagaacgccttgctttgcccagctcactagcgatccgtgatttgggatgctgcacccgatgtcctgctgcagctcaagaaagatattttttaacgaaggcggctgctttacaccgggcttgacagagaagcttaaaccttgagcctgtcccggcccgtgatacggatcttgacccaaaatgacgaccttgacatcatcatatgatgtataatgcagcgcgttgaaaatatcccggctgtccggataaatcgtttgctccgcgtattccctcttcagcatctctctgagctcttgataatacggtttctcaaactcttcctttagctgattccaccagctgtcttgtaaaagctgtttcaagattcaggcctccttacgaacgatgaagtctggaatagacaggctcgccatcccaaaccatttcactttttgcttcccgcctcttcatctcaggctcttcaagcaggacggcaaagtttttcgtcggcagctccccgagtccgtgcttttcacttaaacgatccaaatattgcttccgcttggcgccaaggtccgcagactgattgtctcccacgtcactgaaggcataaatcacactggcgcaagggacacgcttcacccggtaatccttggctgcgcgcagataaaaatcccaatcccagtaattgtgcacatcagcatcgaaatacccgatttcatcatgcagaaaacgtctgtacatgctgcccgacggcacgtatgtagaaaacactctcatatcctcatagtcagcggtataagcaaacaatttccgtgacactggataccttgttccgtttttctcttcaaacgaaactatttccgcatcagaatgaacgaagtctgccgtttctatttcctttgccattttctcgatatgccctggcgtaaagaaatcatcgtcatcacacagcataatgcaatccccagacgcctcttttacaccggcatttctcgcagccacatgccccgagttcttttctaaattgatgacagcaatcggtagctccggatacagtgctttgaccggcacgaccgattccccggcatcattcacaataataatttcatacggcttcaaggtctggcgggaaatcgactccaaaagctcacacaaagccggaatccgattataggtcacaattacgatagaaatcttcatgatgctctccttctcattttcatagtcatgtactattaaaacatatattggacgggagatcagtgggaatatcctactgaaacggcatactacaatgatagaaacagcaaagtggctccgatcagaagcaccatgatcagcatcagatctccaaagacatgaaagaaatctttcatgcggacgccattcggaaggataagacgccacagcttagattgatagaccggcagcagcaccagtgcataagaaagacacaaaaatgtaaaagccggcggcacaaaagcacagcctgcatcgtcccaattcatcatgatgtctttcatactagatccatccaataaaaacaaagatatcatgagggctagcaacacaaaggaccccaattgaacctcaaacaggcgcattttctggttatatgcaaatcggaccgcccaaaaccagacataagcatatgaacatagcagcgtaagaatggcacctgctgtaaagacgacatcaggcagccgatcaagcagaaaaacaaaaggcaagctggctgccatagccaagagcatgcagccaccagtaaacaaaaatactgccccatgagctacaaaaccatataaacaagagctaatcctcacgacatacacctcctttacatagaaattctatgtatatacctaaaaaatcagacaagctgacgcctgccaatataacagcccattcggccaaataacggaaataacagcgttgcaaaagcacaagttccaacaaaccaaggtgtcaacaaggattgaaacagcgcagcaggaattacattgaatagaaaaacaagcataaaaatgacgtttggcaccattgagatcagaatcgtatgtagaacaagcttttctccgcgttttccaaactccttcacgccttgatacccaatcagcacccagtagatcatatatgcagctaagatcagccaaacagaaacagaaatgcctttccatactgcttgaacaaacggtgattcaagccatacatgcattattgtaatcgcaatgccgacagcgaatagggcactgttacagaaaagatggaacatcaaaaacgcacggaacgttactggctgtattttcttaaacgaagaaacaatgtcagttggtgttccaaacgcctgcaataaagtctgcatagcttcctcctcactctttccttcctgaaaagagcgaaacagatgatgttcaatatggctctcaatctcttctatcatcgcctcaccctcaggaagccctttaagcccgcttttgatttcggatacatatgtttctttatccattttgtccgctccacttcagtattcggtccatcatggctgaaaatacgctccattccttcgtgcgttccgccagcacttctttgccctcgtctgtaatccggtaatatttgcggtccggtcctttctcctgcttctcccagtaggaagaaatatacccttggcgttcaagcttgtgaagagaaggatacaaggtcccttctttcatctgcagttcatttccgctgcggcttcccatttcttttacaagctcatagccgtacatcggccgctcgttcagaagcgtcaataccaatataaccgtgcttcccttaaccagctcacgatttaacatctcaaaacccctacctagttttcttatgtagcattttacgaaagcccgttgagattgtcaaatgattcctatagatcttctatattgtgatacagagaaaatctaactataatgaaagacaaaacacgatggaggttcaagacatgtctatgcataaagcactcaccattgccggctcagattcaagcggcggtgctgggattcaagctgatttaaaaacatttcaagaaaaaaacgtatacgggatgaccgccttaacggtgatcgttgcgatggacccaaacaacagctgggaccatcaggtattcccgatcgatactgatacaatccgcgcccagcttgcaacaattacggacggcatcggcgtggacgccatgaaaacaggaatgctgccaaccgttgacattatcgagcttgcggcaaaaacgatcaaagaaaaacaattaaaaaatgtggtaattgaccctgttatggtttgcaaaggtgctaatgaagtcctttatccggagcacgcccaagccctgcgtgagcaattggctccgctagccactgtcattacgccaaacttgtttgaagccagccagctcagcggcatggatgaactaaaaacagttgacgatatgatcgaagccgcgaaaaaaattcacgcactcggcgctcaatatgtcgtcattacaggcggaggcaaactcaaacatgagaaagccgttgatgttctctatgacggagaaacagcggaagtccttgaaagcgaaatgatcgatacgccttatacacatggcgcaggctgtacgttctcagcagccgtgacagcggagcttgccaaaggtgcggaagtcaaagaagccatttacgcagcgaaagaattcatcacagcggccattaaagaatccttcccgctaaaccagtatgttggtcctacgaagcattctgcactgcgcctgaatcaacaatcataaacaaaaggggctgcctaacaaagaggcagccctttttaaatcaccgaagacttttcacagaaaaaactgccgatcccatcggcagcctgtttatttgatttttaaattgtttgcagatttcctcaaaaatgtttctatcgactgaacaaaaagtgcatattccttcatttgttcatatgcccgcgtgagaatttccgccgtttcactgtgcggcgttgttccgccaagcatttttttcagctgaagcagcacatccttatattcttcccgcttatcttcaacttggttagcagccttttccaaacattccggtgttatcttctgttcatttatattcaagaaaacaactccttttacagaaaaaaatagtaggttatcgttgaagaatagcacagatggctcagatttcacataagaaaatagaaggattttctacataagtgtccaaattctgacattcatttcagatttcccggtcgaactggctgttacttcatgatttcccgggaaaggaaaatatctcgcactaaagacctcttctccgttattgataaagatttcaacagaggatgcgtcgataaacatgtgcacggtatgcaaatccttgatgcggcaatgtctcgcttctgttctttttccgtcaaagccctttcgttccagcgtaacattccccttgtctttatggaaggaaaacgtagccgttccgcggatactgattgaaaagcctgactctgtatgaatgtcttccagcagaatctcagttctttcaggtttttccactggaagcgtaccagatgatccatgcatgttgatgtgtatttttttctcatttctgcgcatggcttttagctcaggcagcggctgctgaatcagcttctcgcctgatattgtcagctgtctcggcagcgtcatgcagtgaatccagtgatagtcaatcgtcggatgagatccttcatcctggtcaggcacagccatccatgcaaacaaaattcgtctgccctgatcatcttcaagtgtttgcggcgcgtaaaaatcaaaaccttgatcaagttccctaaaatcaccatgcttcagttcaggcttgttataatcgagacgcccgacaaaataacctgactgatatacgttctgataaaggaaaccgtcagcctcaagcccttgaggcgaaacaatcagcacgtccgatccttgaagggaaaacaaatcagggcattcccacatgtatccaaaatcgtccagcccgttgaagcccgcgccggttatcgggccaagaaatctccactcactcaggttatcagaagcaaacaatacagcctgccctttcaaattctctgtttgcgcaccaatcaccatataccatgtgccttcatgctcccataccttcggatcgcgaaaatgcgccgtatatccttccggaaggcgggcgacaacaccctttttctcaaaggacagcccgtcgtcagaaacagcaaggcattgatacgtttcccgatttccatcctgatccctgacatttcctgtgtaaaacagatagagccgatcgtctttcgtgacagcgctgcccgagtagcagccgtttttatcaaaccaatcactcggagccagcgcaatctcttcccgcttccaattcacaacatcctgtgtcgtataatgcccccaaaattttgcgccgtgccccgtctgaaacggctgccactgaaagaatacatgatagctgcccttccaataaatcacgccattcgggtcattcagcagcccaaccggcggcatgatatgaaaatgctggcggtgcggatcgctgttagcgatgggctcttttttctccacttcttcataagcccggcgacgaagctcctggtcatgtgctgtcattttttcctctcctcatcctcattaatcttcatgacaaatgctgcaatgaacgctgacactgctgcaatcgccatgccaatcagatagtgaatcaagttgctgacgccaaacggagccgcaatggcgatcatcggaattcccgttaacccgtaagcgtttgcagctacatgtgtaaagacgacatatgccccacccaatgcgcctccgatcatcgcggcgataaacggttttcggtagcgaagattgactccgaatatgacgggctcagtaatgccgagaaaagcggaaaatgctgccggaagcgcgatttcttttgtctttgcctttttcgccataaagaagacggcaaggcctgccccgccctgtgcgacattcgccattgaccagataggcagcaagtagtttttgcctatatctgcaattaaccccgcctcaatcgcatggaagctgtgatgaacacctgtcagcacgatgagtgaatacgtgcccccgaaaatcaaacctgcaacaaaaccggcatggtcatacacataagttaaagcaaccgtaatcccggagccaagggctcttcccagagggccaatcgcgataaaagcaacaaacccggtgacaattacagtaacaaaaggtgtaacaagcaagtctaccgcatgcggaaccacttttcttgtccatttctctaccttgctcattacataaaccgccagcagaacagggatgacagttccctgatagcctagaagcgcgatatcaaatccgaaaagatgcatataatcaggtgtggcttccgccaatccccatggatttaaaagagacggatgaatcatgattcccccgatgaccgctcccaagtatggattgctgccaaactcttttgaagcgctgaccccgattagaatcggcaagaaaatgaatgctgcacttgaaaacatatcaagcagctgcaaaagcgcagaatccttgctcatccaatgaaacgcattgatcatacccagcaatcccattaataggccgctggctacaatagccgggatgattggaacaaaaatattagaaagcgttttcgcaaatctcgcagcgggattcagcttttcttttgccgcatcctgatgatttacgtgttcttcacgctcgatatcagcttctttagaaaaggcatcgaatactttattcacaaggcctgttccgaaaatgatctggtactggccagagctgctgaaagcccctttgacgccatcaagctcttctacttgtgcttgatctatctttgattcatctttcatcactaaacgcagtcttgttgcacaatgagccgcgctgataatattttctttccctccgagaagctcaatgaggcgttttgcagtctctttgtaatccatctatttctcccccttttatttaaacaaaaaagacctaaaattcgccaacgaataaaggacacagcgatcctttttcatttacgcaaattttaggtcttgcctgctttaccagtcacaatcccgcttattcagattaagaatacgctttcatcataaatcatgacagcgttttcgtcaactatttttttagttaaatagtttgataaaacatgtagacaaaaattcgtaaaaattaattgtgaaatacttcacaatatcgtgctatactatgctcaatcatgaaagaaagcaggaaaagacaatggaaactcaagcattgcaaaaggttgaacagtatgctttgaaaaaacaaaacatattcgcttcaagcaaaatccgttatgtgcttcggtccattttggccagtatgtttattggttttggcattacagccgcaagcaaaacaggcagctatttctttatggctgattctccgtttgcctttccggcagccgctgtcactttcggggccgctattctgctgattgcttacggaggcggagatttatttaccggcaacaccttttatttcacctataccgcgctccggaaaaaactcagctggcgcaacaccctgtacttgtggatgtcaagctatgccggcaatttaatcggcgccattctgtttgccatcctgatcagcgcgacgggactttttgaggagccttctgttcattcctttttgattcatttggcagagcacaaaatggagccgccggcttccgaattgtttttcagaggaatgctgtgcaattggcttgtgtgcctcgcctttttcattccaatgtctctcaaaggggaaggagcaaagctttttaccatgatgcttttcgttttctgcttctttatttccggctttgaacacagcattgccaatatgtgcacattcgccatctcgcttttgatcgagcaccctgatacagtgacactgatgggagcagtcagaaacttaatccccgttacgctcggcaatctgaccgcgggaatagttatgatgggctggatgtactacacactgaatcctgatcaataaaaaaacttccagagatcactccctgcaagtcaaagcggttattccgagagatcttgaagacgctggacatgcagcgtgatatagccggcctcggattccggcaaatgtaattgatattcatttttcaaaaactccgccagctccagcgcacattgataggcgaatgaatactttttttggatgaaataaagcatctcctcgtccatacgatggagcgcttcatttgattccaaccggctgaccgcgtatcgcaaatgcgtgacaaggcgttgataggaaatgctgttttcatccacctttcgattaaagtattgttctattttctctatcatttctttgatcatggtcgtatgcttcagcgctgaatacatgctctccgcatccatcttcgccgtatggatgtgaagggcaatataacccgcttcatcttcaggcagagacacgcccaatgtctcttttacatgtccgatcgcccacaggccgatctcgtattcttttttatagagcgcctttatctcatgcagcaatttattctgcacaagcaacccattttgaatcctttcgatcgcaaaggacaaatggtcggaaagcgcgatatgaatgtgatcgctcagcggcgccgcgagctctccttccgcatagctgatgatatcctcagctatttctacatgctcctccggcagtgtttgcaggatttgtttgaacttttcattctcgtcgcgcacgacaaagattttttccactttattcatagggatgagatcatttttctttttttgaaaagcgattcccggccccatcacgattttttcctgatcatcctcttttattaaagccgcattgttgtttaatactttatagattttcaagaggttatctctcccgccaatttgcttttgactgggattttacctccttttgaccgccatgtaaagatgcgggcccgctctctcctgctttggcgattccttgaaggcttgcaaacatcttcttttataaagcgcggcggctttcgctttctgcttttcttcctcattcacagccatccgccactcataaaacgaaacgagtcctgcggcctgcacagccgcctttctttggtatgtacgctgagccgaatagaccgcggcagccgcagtttttctgtccggcgtcacccagttcatcaaaaagaccatccacacccgtaaagatacaagcaaacgtttcatagaaaaacatccctccgcttctttttggcaggcagcctttttagcagcccgttttctcagccgcagcccgcaagaaaagacggccgatttcttttctcgcaaactagcggctctagcaaaactcatgactctatgatagaccgtggaaagagaattctttgtcacaatatgagtgaaaaaaccaactagtttttagaagttttgttgaaagctgaaagaattgaaatgaaaattggagaaccgctttgaaaactttatacacaagttatcccaaagataagaacaacttaatcacaagagatatccacatgtccacaaactctatctatattttgtatacgaacgtatattcctaactatatatatacacaggtttattcacttatacacagggttctgtgtataactccttcgttatacacaaacaaactccaataaatggtccaaatgacacaaggatttttttgaattttcaagaaatatatactagatctttcacattttttctaaatacaaagggggaaacacattgaaaaaggggatcattcgctttctgcttgtaagtttcgtcttattttttgcgttatccacaggtattacgggcgtccaggcagctccggcttcttcaaaaacgtcggctgatctggaaaaagccgaggtattcggtgatatcgacatgacgacaagcaaaaaaacaaccgttatagtggaattaaaagaaaaatccttggcagaagcgaaggaagcgggagaaagccaatcgaaaagcaagctgaaaaccgctcgcaccaaagcaaaaaataaagcaatcaaagcggtgaaaaacggaaaagtaaaccgggaatatgagcaggtattctcaggcttctctatgaagcttccagctaatgagattccaaaacttctcgcggtaaaagacgttaaggcggtgtacccgaacgtcacatataaaacagacaatatgaaggataaagacgtcacaatctccgaagacgccgtatctccgcaaatggatgacagtgcgccttatatcggagcaaacgatgcatgggatttaggctacacaggaaaaggcattaaggtggcgattattgacactggggttgaatacaatcacccagatctgaagaaaaactttggacaatataaaggatacgattttgtggacaatgattacgatccaaaagaaacaccaaccggcgatccgaggggcgaggcaactgaccatggcacacacgtagccggaactgtggctgcaaacggaacaattaaaggcgtagcgcctgatgccacacttcttgcttatcgtgtgttagggcctggcggaagcggcacaacggaaaacgtcatcgcgggcgtggaacgtgcagtgcaggacggggcagatgtgatgaacctgtctctcggaaactctttaaacaacccggactgggcgacaagcacagcgcttgactgggccatgtcagaaggcgttgtcgctgttacctcaaacggcaacagcggaccgaacggctggacagtcggatcgccgggcacatcaagagaagcgatttctgtcggtgcgactcagctgccgctcaatgaatacgccgtcactttcggctcctattcttcagcaaaagtgatgggctataacaaagaggacgacgtcaaagcgctcaataacaaagaagttgagcttgtcgaagcgggaatcggcgaagaaaaggattttcaagggaaagacctgacaggcaaagtcgccgttgtcaaacgaggtagcattgcatttgtggataaagcggataacgctaaaaaagccggtgcaatcggcatggttgtgtataacaacctctctggagaaattgaagccaatgtgccaggcatgtctgtcccaacgattaagctttcattagaagacggcgaaaaactcgtcagcgccctgaaagctggtgagacaaaaacaacattcaagttgacggtctcaaaagcgctcggtgaacaagtggctgatttctcatcacgcggccctgttatggatacgtggatgattaagcctgatatttccgcgccaggggtcaatatcgtgagcacgatcccaacacacgatcctgaccatccatacggctacggatcaaaacaaggaacaagcatggcatcgcctcatattgccggagcggttgccgttattaaacaagccaagccaaagtggagcgttgaacagattaaaaccgccatcatgaataccgctgtcactttaaaggatagcgatggggaagtatatccgcataacgctcaaggcgcaggcagcgcaagaatcatgaacgcaatcaaagcagattcgctcgtctcacctggaagctattcatacggcacgttcttgaaggaaaacggaaacgaaacgaaaaaagaaacgtttacgattgaaaatcaatcttccattagaaaatcatacacactggaatactcatttaatggcagcggcatctccacatccggcacaagccgtgttgtgattccggcacatcaaaccgggaaagccactgcaaaagtaaaggtcaatacgaagaaaacaaaagctggcacctatgaaggaacggttatcgtcagagaaggcggaaaaacggtcgctaaggtacctacattgctgattgtgaaagagcccgattatccgagagtcacatctgtctctgtcagcgaagggtctgtacaaggtacctatcaaattgaaacctaccttcctgcgggagcggaagagctagcgttcctcgtctatgacagcaaccttgatttcgcaggccaagccggcatttataaaaaccaagataaaggttaccagtactttgactgggacggcacgattaatggcggaaccaaacttccggccggagagtattacttgctcgcatatgccggaaacaaaggcaagtcaagccaggttttgaccgaagaacctttcactgttgaataagaaaaagccctgccgaatcggcagggctttttaaagatcagtcagcaaacgcctcctgcaataatcgatacgatcggagcttatcttcaaaatgatgtgtgatggtcaccaccatgatttcctctgtttcatacgctttactcaaagctagcagccgctccttaacctgttctttcgtaccgacaatcattcgatttcgattatcagcaattcgtctctgttcataaggagaatacgtatttttccgaacagcttcatacgaaggaactccctctaaaggaataccctgctctcccgccaaaagtgtaaaatcaagcacagccccaagctcctctgccttctcctccgtgtcagcacaaagaacaaaaacagcaactgccgctcgaggcgtatctcctaacacagacggtttgaatcgtctcttatactgtctgacagtaccctctccgccctctccattgataaaatgggcaaacatatagccagcgccagattcagctgcgagcagcgcgctttctccagatgagccgagcagccacacatccggagccgttgaaatatgcggcgcagccgtcagattcggaaaacggtgtttatcatccgccaaatcatgcaaatacatggtcagctccttgatttgctgcgtatactgatcagcattgcgcttaccgccgtcattcagcgcccatgatgcaatcggcattccccccggtgctctgccaagccccaggtcaattcttcctggtgtcagcccctccagaacacgaaagttttcagctactttataagcactgtaatgcggcagcatgactcctcctgatccaacacggattcgctttgttttcgccgctatatgactgattagcacctcaggactggaccctgccagccgttttgaaaagtgatgctcagaaacccaaaatctcttatatccaaggtcctcagcagcttgggcaagcgcaacggtttgctgtaaggccgtttctgcattgctgccctctgatactggagattgatctaatatacttaatgaaaccatccctaccacctcatcctcatcgtatcactgatcttctactttttctccaaagccgctcacattgcttatcagtgtcccctatcattcgccatttatttgtgaaagcctgtccctatttgtcggaatatgttacacgtgaaacataaaaacccctccagacggagaggtttgctttagtttttattaaagcccttttctttcacgtagtcatttaaatacgtacgcggcttttgcttcataaagttcagtatttgatcggaccacgtttcttcccgctgcccgtttgttctttctctatagtaatcagaaatggttttgtcatacgtattcatagtatgacggaaatcgtctgtgttcacattatacgtattctcatgataaacggcctgctttggcaatctcggttttttgccggaaaggttcgcaggatggcctactgccagtccgaaaagcgggagcacatggtcaggcgtttgcagcacctctgtcaccttgtccagttcattccgaatgccgccgatatagcaaatgccaagccccatggattcagcggcaatgctcatattttgcgctgccagcgccgcatcaatcaagctaaccataaacatttctgtattctcgagcagctcagaaatatgttcacctttttcctcagccagtttttgatggcggtacaaatccgcacaaaatacaaaaaagtgtccgttcttctcaacgtaaggctgattcccagcaagcacggacagctcacgttttttctcaggatcagaaaccccgataatcgaatatgcctgcacatagctggatgtagacgcagcctgcgcacttttcactaatgtatcaatttcttcagctgtcaaaagctgatcagtaaaagaccggattgaccgatgattcaaaatggtttcgattgtgttattcatcacaaaaacctccttatcactttttatcatatccgaaaaaaagtgatctcaaaagcgaaatgctctgcacaaaaaaagacagcctctgtaaaggctgtctgcatattaagaattaaaaagataacttctgtatttcgtcagctgcacacttgcattatatacaatcccaaatccgattaacgtggaaagtgtcgagcttcccccatagctgacaaacagcaacggaatcccggtaacaggcataatgccgatgttcattccgatattctggaatgtgtggatcacaattaacgccgtatagccaacgcaaaagaaagaagcgaaacggttaaacggatgtattttgtctatcagaacaacaagcctgtagattaaaaagaagaacatgatgacaacaattgcacagcctataaagccaaatgactcacctattatagaaaagataaagtcagtcgtactctctggaacataaaccttcaaattagaaataccattacctaaaataccaccagatcctattgccatgatggcctggtcaacttgccagctgtcatttgaatcttcctgtgtctcatttgaagcagacacccaagaagtgacccgcttaatttgataatcctgtattccaactgatttagcaacgtcaggaaagtttatcattactaataaaattaatgaaatgagtaagatacctgaaccagctatgatcgcaatcaatttccaatttatacctgacataaaaaccattacaagaacgataaacatacatattcccgcagtcccagcatcctgcatcaagataagacctacaggaataactgcgacacccgcaatctttaataacaagtggatatcatccctaagcgtccgaactcctttaggattagcttttccaataactgaagcaagcatcataatcaaaccaaccttcataaactctgacggctgtattgttattctaccgatcctaaaccaactttttgcccctttaataacaggtgcaatagactcgggactgattttaagaataatcaaagataaaataccaatgataaaaatatataaacttaacttttcaagctgttctaaatcaaagtacaaaagaactgtaatggcaacagcccccaaaaaataaaacacaatttgctgaatccaatccgtgttcccatactgcccaaactgaccggcagcataaattgatactacgcttataataaaaaacacaccaaatataaaaatcaaatccccctggtaaaaggggctttgctgtttcttatatcgactcattctatcccgccttacattttcatcggaaaatcactaatgtttattatacatgaaccacgttcaagatgacacgtgaagctcgcttccttttatgttttttcagcatttgcggcgctttttcagctacacgaaatatgacgtatcataaaccgaaatgtttcgattgacacaaaacttttcaaatgaaaaaaacgccataccaaaagaatttgttaaaaaacgaatgcgataatgtgttatattcccaaataatgtgatacctcataagaaacagctaaaaattcagagccccatgcccatacattctcctagcacattaaacgaaaaaataagacgatagatccagtccatttctgcaaaaacacgtatcaatttctggaaaacatggtataataattgtaacagaatattcaaaaaacaatcacaaaacagacacaactcagttcctctatttcatttttgtaaacgttatcacaaaatgaaaggagacgggtatgatggacatgttttttgcttacttattggttgccagcgcaacgcctctctttatttggcttgataacaaaaaagtcgcactctcagctattccgccaatcattttaatgtgggtattcttcttcttttacgcaacagaaagcctttctccacttggacacactctcatgattatcttgtttgccgttaacgtcattgtcgctcatatcgccgcatttatcatttacggccttccgtatcttcgcagaaagcgaagcagctgaagacagcaaaaaaccctcttccaatgaagagggtttttgtattattcgttatggcctgaatgctctgagtgttcagcgcctccaggaggatttccgtccatatggtcaccatggtgatagtgagccgcgaaaatccagatggatccaagtacgataacgatcgcgccaaagaatccgaacagcgtgtttccgacttggatcgtgccgttttcgctctctgtcatatgcatgaacatgagaagctgcagcgccgcctgaatgaaggcgaagccgaagataatccaaagttttgctgatgagctcaggtcagtatacactgcaacccatagagccagcagggtcaaaacgatagacaggataaaacctacaatgtgtttccatggaaagtgactgtgttcagcagatttgtttgccattttacagacccccaatcccatgagatagacacctgtaaagatgaaaatccatacaacatctaagaagtgccagtacaagcttgagataaagattttagatgaagtttgcggagttaagccgcgtttcttcaactgaatcagaattcctgtgatccagaaaatcccgattgttacgtgagttccgtgagttccaagtaaaacaaagaatccagaccagaacgcacttgtactgagagccgctccttcatgtacatagtgaacaaactcgttgatctcgcatccgacgaagccggcaccgagaagaagagtgataattgtccaaatgactacgccttttaaacttccgcggcgcatttcatgaacagcgatcccgcaggtaaagctgctgatcagcagcaagaacgtcataatcattaccagattgacttcaaatagttcgtctggcaagacacctccagctgttctgtttttaagaacgaagaaggttgcaaatagtgttgagaacaacacaatttctgcccctaaaaagatccaaaacccgagaatattaagtctgccggtttcagattgatattccataggcgcgttagaattgccgtgttctgcatgttccataactcacgcctccttattcggaaatctttctttccgtctcttttatttcatcaacactaatgtagtagccgttgtcgtattcgaatgaacgcagaaccatgcagagcaggactccgatcaatccgactacgcccatccagtaccattcaaagacaagtccaaagcctgcaagaccgaaggcaacagacataaagaacggtctgcctgagttgcttggcatatggattttcttgaatttgctttcagggtataattcagttttttcttctttcatatgcaggaatgcatcttgagatttgacttcaggaagcaccgcaaagttgtaatgcggcggaatcgcagaagaagtcgcccaatcaagcgtacgtcccacaccccatgaatctccgctgatttcacgagtagagtaacggaagctgtagtagatgttatagcaaaggattaagaatcctacacccatcatgaaagctccgactgttgagataaagttcaatgttgtccagccgtcattcggtccgtatgtgtaaatacggcgaggcatgccttgaagccccaagaaatattgcgggaagaaacaaatattgaacccgatcataaagatccagaagaaccattttccgattctttcgttcagcttgtggccgaacatttttggataccagaaaataaatccggcgaaacaagcaaatacagtacccgcgatcagcacatagtggaagtgagatacaaggaagtacgtattatggtattgataatccgctgctgccatcgcaagcataacccctgtaaccccgccgataacgaagttaggaatgaacgcaagcgcccacagcataggtgttgtaaagctgattcggcctttatacattgtaaagagccagttaaagattttaaccccggttgggattgagattgccattgtcgtaattgagaagaatgagttaacggacgcactgttccccattgtgaagaagtggtgagtccaaactaagaaactcaatacagagatggcgataatagaaccaaccatcgctttgtaaccaaacaattgttttcttgcaaagcttgagatgatttctgagaaaataccaaacgccggaagaataacgatatatacttcaggatgtccccaaatccagaacaagttagcccaaagcatcggcataccgcctgcttccaatgtgaaaaagtgagcgccgaacaaacgatcaaatgataaaagtgctaatgctactgtaagtacagggaaagcaaacacgataataaccattgtgatcagtgttgtccatgtgaacattggcatacgcattaatgtcatgccttttgttctcatttttaagattgttaccataaagttgatccctgtcatcagggtaccgataccggcaatctgaagtccgaggaggtagtagttctcacccggcccagggctcatgtcgttacttgcaagcggcatataactcgtccagcctgcgttcggagaacctccgataacgaaagaaatattgaaaagcatcgcccctacaaagaacgtccagaagctcaggttgttcaagtaagggaacgcaacgtcgcgggcaccgatttgaagaggcacaacaacgttaataagaccgattaagaacggcatcgccatgaagatgatcatgattgtaccgtgagttgtaaaaatttcattatagtggtttgagtctaaaaaactgttattcggaagcgctagctgggcacgcatcatcagaccgtcgacaccgccgcggaataacataattacagcagatataatgtacatgattccgagttttttatggtcaacagtagttatccattcagaccacagccatttccactttttgaagtaagtcagtacaaaaataatggcaatggttgaaagcgcaatggaaacttgtgcgcccagaattaatgggtcaccagttacgaaaaattcgtcccatttgaatttcatgcaggcttcctcctttcctgatcaatatcattcttctgtatcatcagacttcttaaattcgtttttctttacgttttcaaacggatctgttttagagtgcggtgaaacggcttgatagccaaggcgtttgcgcgcctccatcgcgtactcagcgtcttgtccgtgatcaacgtatttcaagtgagtagaagagaacgttaattcgtccacattttcaggaagcatcaattcatcatacttctcttttgtcagcttaggagcctcgttctgagtctttttcacccagctgttaaagtctttttctgtaactgcattcacatcaaactcttggtctgcaaaatgttcacctgtgaagttcgcgttgcggccttcgtaagtacccactttgtcagcctgtaagtattgatccatcagcattcctgccatcgcatatttttgccctccaagctgaggaatccatagcgaagccattgaatctgcagatgagattttgaacaagatcgggcggtcgacaggaatgtttaagtagttgaccgtttcaatatcctgttcagggtagctgaatacccatttccagtctaccgaagtagcataaacaacaagaggctctttatcttttgttgcttcaggagctttttctaacgaatatatcgtctgtactgttggcacagaaagtgcaatgacgattaaaattgggatcactgtccagactacttctaaaaacgtgttaccgtgaatttctgggttataagatccattatctttgcctttacggtcgcggtattttactaaaataatggtaaatagaacaaagacgaccccgacgataaacagcataaatccgatagataacaggattaaatcactttgctgttcagctacaggtcctttcggatctagtactgaagcattgctgcatcccccaaggacgaaaaccacagttaacagcgctaatacaagcaacggttttaatgctctgaacaagaagatcaccatccttcctattgatgtaataaatctgaagtgcatacttcctcaaaatcttttctctactttgttatgctatcaaaaacttcacttattagctttatttttttataaacttcatcccattttcgcttaaatgtcataaaatcgacaaaaattgctccaactttattcacatctatcgcttaagatgaaaagtttctagttatttccgcatataagtaaagaaaagatgatgaagaactaattctgacaaataaaggtttaccacaataaaaaacttaggtcaatcaaaaatttcattttgttaaactttctagataggaattattttttccttgtctagcatcttttcacacggttaccattttaacgcatcaaatattgaaagaaaaggcgcaatgaagagccaatatgctctgaattgtccgtattttttaatgagagcatccagttgtttatcttatacaaaaaagaggaatgatataagcaaataaataaaaaataggatgtgttgcatgatgagttttcttatttcacttatcgtcgctattattatcggatggcttggaagcctgtttgtaaaaggagatatgcccggaggaattatcgggtctatgatcgcaggtcttattggcgcctggatcggacacgggctgcttggaacatgggggccgcacctagccggatttgccattattccagcggtaatcggtgcagccattgttgtctttctagtaagcctgttaaccagaaaaagaggataaaagcagcagcacccgaagcgtcagcgctttgggtgtttgttttgccataaaaatcgaaaaagcctcaaccctagcggttgaggcttttgactggtttggcgcccaactggtcgataaaccttctgaaggcctgttttccttctgttgtctgtttaaacacaccggcgtgttcaaggatgcgcgcgaatacatgtcccagctcttcttttatgactagatctgcattctcttttgttatggttcttttttccatcatccgattagcccactcactatgttttgccgtgagcggattttgttctaaagctgttttcggatcagcagagcatagcgccgctgccgtttctttcatttcctcctgtaagcggcccggcaatatcgccaatcccatgacctcaatcaggccgatattttcttttttaatatggtgaacttccttatggggatgaaatatccctaatggatgctcctcatccgtccggttgttcctcagtacgatatcgagttcatacaagcctcccctgcgccgtgcaatcggtgtgaccgtattatggggcgtatcgcctgtataggcggcaatgccggctttttcatcggaatacgtctgccacgtgcggaagatatggtcagcagcttcggcgacatgacccggttcgtctccttggagcctgagcacagacatcggccacttcactaagcccagcgacacgccgggataatcgtttaattcataaacgtcttccgcttctgcacgtgccattggaaaatcatgcgcgccgccttggaaatgatcatggcttaggatgctgccgccgacaatcggcagatccgcgtttgaaccgataaaataatgcggatattggccaagaaatgacagcagcctttcaaatgtttttttgctgatctccatcggttcatgttcaccttttaagacaatgcagtgctccggataatagacatatggcgagaattgcaggaaccattgttcgtcctcaaggatgaccggaatgattctgtgattttgccgggctggatgattcacgcttccctcgaagccgacattttctttacacagcaaacacatcggataatttgtctgttcctgctcttttgcagccgcaatcgctttcgggtccttttcaggctttgataggttaatggtcatttccagctcgccatattcggtcggcaccgtccaatgaacatttttggcgattctgtcagtccgtatataatagacatcctctgaatattgatagaattcctttgtcgcctgttttgggccgtataatgcttttgtctcttcaaatttgcgaatgacctcggacggggcaggcacaaaacagcccatcagctttgcgctgagcaggtcacggtacgtatctgtatccgcttccattcggccggtttcggcagcccatttatagatgggagctagcaagtccggcaggctttgtgactgcttgatgctggtgctggagttcggctcgggatgtgtgatgcccagcgcttcataaagacggtttctcgtatattcccgatcccagatcgaaatcaattttcgttccaggccatactcaagcagctgttccagatgttcaataatactcatatgtcactccccctttagttctctcgctccctctccgatatccgcgacataaaagtccgctcggagccctgttttttcttgatatctgtctccaaccttctgaataaaatcatcaacgaactcatcttttacaatgctgatggtgcagccgccaaagcctgctcccgtcattcttgatcctattacaccttcgtgatcccatgccgcaaacacaagctcatcaagttcagggcatgttacttcatagtcatccttcaatgagaggtgggattccttcattaactgcccaatttcatctatattgttctctttgaacatatgggccgtcttaatagcacgatgattttcgtatacagcgtgctttgcccggcgtctgttcgtttcattttggatcaggctggaatgcgcatcgaaatcagaaggcttgatgtcgcccagtgcggcaatatcgaggccttttttcagatcaagcaatgcatcattgcattcttggcgtctcgtattatagctcgagtcagccaatgtcctttttttgttcgtgttcgcgatgaccagcgcgaggcctgagacattgagtttgctatattcatagtcaagcgtgtcacagttcagcagcatcgcatgatgttttttccccattccaattgcaaattggtccataattccgcaattgacgccgataaaatcgttttccgcatgctgcgccattttcacaagctcaagcgcatctacttcaggatgaaaatagctttggagcacgacccccatcagcagttcaatagaagcggaagacgacagccccgccccgtttggaatattccctgaaaatacaatgtcaaagccatagggaactgcatatcccctctgttgaaattcataaatcacgccttttgggtagttcgcccagtcgtcttctttttgatagcgaatgtcgtcaaggctgcattccttgatcccctcgtctttaaagttgtctgaatacatccgaacaagcccgtcttttctttctgcaacagcagcatatgtacccattgtcagcgcgcacggaaagacatgcccgccgttatagtctgtatgttctccaatcagattcactcttccaggtgcgaaaaaaaaccgtaatccctctttttctccgaatacacttgcaaatatcccctttagctcttcccgcatgtgcaatcacctttctggtttttattttttattccccttatttctccatagaaaacggcagatcatatgctgcagtcctctcataccccttcttcttttgtttttttaaagacgagccatttgctcgcaacatagttgacgacaacaatgaccgcgttgtcgagtattttggccaaggtttcatttgtattgaactggccgacaagaatgatcatcatgcctaaatctatgccgagagacaggacccgaacgctgaaaaaagcagtgagctctttcagcaggctctgcagatcatgtgttttttgctgaaacacatataatttatttgttatgtaagcaaacagcacggacaaaatccaagcggcgacagtggcggctttgtaatccacattcatgatctctaccaatatataaaagctggcgatattcacaatggttgtgaaaacccccataatgatatacataattatttctctatacttcactgatgttcctcgctttctgaaaaacttttcaaaattcttggcctctcgtgctctctgtctaaagtaaaaaataccgaaagtgcgtctaaaaagctgcggaaggtggctggctggcccaatacatatgattgtttgatgattccgtcgaggactgcacatattattttagccgtatattcaggatcaatacaggcgtcaatcagctttctctccttcagccacttaatatataacacattttcttccacccacaattcgtacagccggacataggccttgcatttctttaagactttatatgtcggcatgttcatggcaaacgaggtgatgtcccacgacggcttatttatgtaataggaataaagcagttctgcagcgtgttttgcagcctcgtccaatgtcagcgatttcactgactcccgctccatttgatcaagataccctataatgatcttttttttcatctgacgtttttcgagaaggtacagcagaaaatcgtccttgctgacaaaatgaacataaaatgctcctttgctgtacccggcggctctgctgatatcttctacagaaaccggatcatacgctcggtcaatcaacaaattcacgccagcgtctataaaactttcaaatgttgcttctcttttaatttgaaatttgttttttttcatatttttctcctggcggtaatgattacccttatcttacaccggatcaatctttagcggtatttatttctttgaacggttatgctattcggtttcccaggggtcatttttaataggctaaatgatttattttcatttacatactatccagtcagtatttaattgtttattattataaataaggtccattggttatattagtcatttttttagggaataggtaggtggtttttccttcagtttgtgaacaccgagcaactatgtgtgaaatttgttgtactcgcctcatcatcgcgctggcttgtcttttattgcccgcatgttgcaggaaaacattttatacaattggaggttactatgaaaactcatgttaaaaaagatttggacaaaggttggcatatgttaattcaagaagctagatccattggattaggcattcatgatgtgaggcagtttttagaatctgagacagcatcgagaaagaaaaaccacaaaaaaaccgtccggcaagactagtccgaacaggcggatctatttacctctggcttttctatcacctgatctgagttttcaccatatcctctattcaaaagcaaatcgctgcgctgagcttgaggacaaacggtgtgtcagctaactacgacagacagccggtgatgcgatcacctcttggcacatgcattgtcataaagaggtgatgcgaacatgataaccgtgctctggtaaacagcagctttgctgagaacaagctgcattcggtgaggttttgaaagcaaactcgtttatacacggccgagcttgaaaaccttcgcctgtctttagaccactgtgttcacctcttcacgacttccttcttttttcatcctccagatattgttcaacgcataaatcggactttcagtacatacctattggtgtacctttttgcttacgtttagcgaataaaaggaggaaagccatgtacaaagctgattataaacagattgctgcaacgccgtcttttcaagcttttttaaagcagaaacgcgcttttattgttccttctgcgattttcttttttgtcttttatttttcactccctgttttgacatcttatttcacctttttgaatgcaccggccattggagctgtttcatgggcttggctgttcgccatcgcccaattcgctatgacctggatactgagtactgtgtattcccggagagccgctcatttcgatcagtatgtaagcgctttaaaagagggtctgaagggtgaacagacatgaatatgactgcttttttattatttttggcgattgttggcctgacgcttattatcacgtattttgccgcgaagcggacgaaaacgacgagtgagttttatacggcgggcggcgggctcaccggcgttcagaatggactggcaattgccggtgactacatgtctgccgcctcgtttctcgggattgccggaatgattgcgttatatggatttgatggcttcttttacagcatcggttttctggtggcttatctcgttgtcttgtacatcgtggcggagccgcttcggaatcttggaaagtacacgatggcagacatgattgccgctcgctttaaagaaaagaaaatccgcggtgtcgcggctctcaataccattgccatctctactttttatatgatcgcccagctcgtgggggcgggcgcgctgatcaaactgcttctagggcttgattatactatggctgtcctcatcgtcggagtgctgatgaccatttatgtcgtgtttggcggcatgatcgcgacaagctgggttcaaattattaaagccgttttgctgatggccggcacactcgtgatttcgattatcgtgttttcgaaattcggctttagcctcaataccatgtttgaacagatgaaaacggctactccgctgggcgctgattttttgaaccccggaaataaatacaaggtgccgcttgagaccttgtcgttaaacttggcactcgtgctgggaaccgccgggcttccgcatatattgatccggttttataccgttaaggatgccaagacggcccgtacatccgttgtgtcagcgacatggattatcggtgtgttttacattatgacggtatttctcggctttggtgccgcggcatttgtcggttttgacgcgattacggcggctgatcaagcgggaaatatggcggctccgcttttagcaaaagcgctcggaggagactttctgttcgcgtttgtatcagccatcgcctttgccaccattttggctgtcgtgacagggttggtgctgtctgccgcctcagcatttgcccatgatatttacagccagatcatcagaaagggagaagcaactgaaaaagaacaaatgaaagcggccagatgggcttctgtcgccgtgtcagtgctctcgattctccttgcgatttttgcacaatccttaaatgtggcgttccttgttgcactcgcgtttgcggtagccgccagcgcaaaccttccgctgattgtgtttacagtcttctggaaacgattcaatgcctcaggcgctttatcgggcagcctgacaggcctgatcagcgcgcttgtgctggtatcgatgagccctagtgtgtgggacccggctggaggtgctatttttaccggtgatccgctcattccgctgtctaatccaggaattatttccatcccgctcggctttctcggcgcgtggctcggaacggtgctgtcgtctgataaaacaattgatgaagatacgtttgcagaaattcaggtgaaggcgcatactggcgtccatatggaacaggaataaaaaaagctctctttatagagagctttttccttgtcttttcttctgttcttcagaaatcgctttttcaaatacatccttgccggcagcacctggaattacagtgtcgccaataataaaggttggaacggctgtgatgtcagcctcttcataggcgtgcttcaaggcttggcgctgcacgtcctgatatgttcttatttccagtgctgatttgaatgatgcaccgtctaatcccacttcctcggcgagcttcgtcaagatgtcaatgtcgccgatattttggccctcctggaaaaacgcctgaaagacacgggtgttgtattcatgtcctttatggtattccttcgcaaaatggaagccttcaaacgcgaggtctgtatacggatggggcgagacgtttggaaaattgatctcgacccctaatttctccgccattggctgaattgatgtctgccacatgtactgtttggaagggtcattgaccggatcaagctgaggagatgggcttggacgcagttcaaacggcatccactcgacttcaacatcctttccttttatcgcttcttcaaaagcggcttttccaacgaaacaaaatgggcagacgtaatctgaataaactttaatgtgtactgtcatgataatctcctttcgtataaattgattttaaactgtaacaattaaagttacaactgttttttaaataaagaagccgataaggcttcttttatgattccagcaaacgctgggcaatatattctccttttttgcagccgcctgggcatgcatataaagcagaaccgattgtttgtgtatattcgtttaacgcatcctttgctgaaagagccttcagcatcgggataaactgattgtcgggatttttttgaaaactgataaacagaagacctgcatccatatagccggttttcggatcaagtccttctgtgtaagagaaagctcttcgcaaaatttgttttccagtagatttcgctagactgacgtgtgaattagacggaatttgattcagcttcacgggatctgtttcctttttctgtccgaaaggcgcccccgagctttttctgcggccgaaggtatcctcttggtccttgagggaagagcggtcccatatctcaaggaacattttgattttccgaaaagccatataggtgccgcccgtcatccagtcaggctcaccagactgaatccacacgatcgagttcatcaagctgtcatcctccgtgctctggttgcctgttccatctttgaacccgaagaggttgcgcggtgtttcaccattttttcctccgcttaaaaagcctttgttcacaaagcggacctcacaagtgccgaccgcttgatttagcaggttacgcagcgcgtgaaacgccacttgctcgtcgtctgcacacacttgaatgcagatgtccccgcctccctgcttttcatccaggttgtcattgggcatcgctggaagagcggctaggtgcttcggttttttgcttttcagcccgaaacggtcctttccgtctttttcaaaaaagccaggcccaaatccgaatgtgaccgttaagttggaaggggataaatcagcagactcacctgtatcctgcggcggcagatattgatttctctgctccgctgacattttcttgccagacgtcagcatctgtgtgagacttgtccagtttctaaataacgtaatgatgtcgcttttgtcttttgctgttacatccagtgcagcaaaatagacatacgtctgatgggcagttgtgattccggcctgatgctttccgtaaaacggaacaatctgctcctcctctttttcatcctttttcgatggcttagccgcagtctgaacaagtggagcgagaccgccgagtccgctggcaccgatcgcaacggctgcccccgccattgcccccattttaaaatgtcccgtctgtgaatttgttctgactttttttgttcatcgctcatgctgttacaaaactccttttatagcacattcgcaatcttcgacatggtttcagaaagagtcgtcagctttgtgctcagctctctgatttgcttttcacttaatttatcataagacgtataggactgatcatttgttttgtattttgccattaaaacttcaaattcgctgaactccgtatccagtttttccgtcaagtcggagtgatcttttacaagcgcgcttttcactgtttgataaacggcttcggagccttccacatttgccataaggtcgactaaatcgattcgtgagtagcgctcttcttctcccgtgattttcgaaatcccggcttcgttcagaagctccatcgcgcctgctacaatttgttcaggtgttaatttcagtgattgaattgaaccgtcaagctcttttacatccttgagaagctggtcagctgttgccttttccccggaaatatcttgatccttccaaatggccttctcaagcttatggaagcctgtccatttgtctccttcttcaacatcgttttctcgagcatcaattttcggatcaagatctccgaggctttcagcgatcggttcgattcgctcgtaataaacacgcgctttcgcatataacgttttggacttttcgatatcgccggatttcacagcacccgtaaatgcttcagtcgctttgacaagctggtcactctgctctttgacatagcctttatactcatccgctgcttttgccagctgatcgctagcctttttgccgctcttcttcgcttctgtcaggtcttctaaggacgctttcagtgactcggattctgtcttgatttttgctgtatccggtttgtctttttgcgcttctgtgtagattggctgaagatgcttttcgatttctgtatattcgaatggatagtcgctgcgaatatcgttttcaaaggaaagccagtagctgtttaactctttccccttcttttcaatctctttttggtctcctttttccgctgagtcattcagcttagaaatgatggtttccattttatttacggatgcggtgatttctttagtgatcccgcttttttcagatgaagctttttctttagttgaagatgtgtcgttggctccgcagcctgcgcacagcgcaaggatgcatccggctgatacagcgatttttgtgaaattcattttgtcagttcctttccgtttgtaaaatgttttgccgcttctgaaacaagcgcaatcagtaaaaagaggaaaatcaacatttgcggaatcgtgctgtacacagacggataaattcctagcaccgatacagacggcagccagctttctgcatcagacggaagaatgcccgccagttgaaggctgtgaacgccggttccgagaaatttcacgcacatatacaggacaaccgccattgatagaagaaaaaacggcttcaatggaatgcgcattccgagcttgatcatcagaacaccgacgatgacgagaacgataagccctgcggcagttccgccgatcagttcagtgagcgggagcttcccgacaagcccgatgaaaaagatgaccgtttcgagaccttctcttacaactgccagaaatgcaatgagcgcaaaggaaagcaggcttcgtttttttagtgcctgtgacttctggatattgattttttctctccatttatccattgaggcgtttctgtgcaaccacaccccgacatacaaaagcatgacagcggacagtacgccggtgacgccgccaagcaagaaattgttttctccgaatacactggaggagaacagaaccgtgacaccgatgccggctgctaaggaaacagccatgccggcagacgctccgccccagatccatgccgaggagcgcgtgacccgcgctttttttgtcatggttaatagtgctccgatgacaaggagggcctccatcccttcacgaatcgggatcagcgccgcatcccaccagctgtagctgcttgaagcgatcggctcgagcaattgaatcatttcgtcaatttgctttgataccttttcgggatggctgccgatctccgccttcatcagtgccagattttcctccgatgtcgtataggcttctttcgattgggacacgacgtctccctctacggcgagccaggatgtaactaaattgtcgattgcggatgacgcttcatccaattgttttttttctatgaactgttttgtgtctttcaagctttgtatataggctgttaaggacgcccttgattgacctgaggatgtctttttcagcacgacagcctgctgataggtttctaaatgagacgcaagctcttcaagctgtgttttgagcttgcctgcgtcttgattgataaaagaaagagaaatcatcgcgatattcgcgtccatttcactgtgagaagaaaggttttctttcttaatagaaggttcttcttttttccacttcgctttgaaggtttcaaacgtttgttgtgccgaatccatatccccgtcttttacggatttgatcatttgcttgtttaattgaattaatgcggcgatcggatcatcttccgcatgtgccgcagaaccgaaaaccatcaacaagctgaatagaataagtgccagcccccgagccatcatgttcctcctataattgaaaatgattatcattgtataacataatcatagccagttcttgtcctttgtcaattaaaatttgaaggtctgaaaaccttgatggacagcaaaaaagctgtccttttacagaacagccttttgaaggaagatgaacgattatctttctgttttatatgtttgaatttcctcacgaaacttgcgtgcagcactctcaggatcttccgcctgactgatggcgctgatcatactgacgccatcggcccccgcttggataacaggtgcggcattatctattgtgatgccaccgatgccgacaattggaatgctgatgccttggcggcgcactgcttcaataagagataccccttgtaccgctctcgtatcttttttcgtttcagtcggatagatcggcccaagcccgacataatcggctccgtcttcttcagcttgcttcacctcagacatcgtatgggcagaaacgccgagaatcatatcacctatggcagctcttacctctttcgcatttgcgtcttcctggccgatgtggataccgtcagctttcagcttcagagccaattccacatcatcattgacaatgaacggaataccagcttcacggcaagctgcctgcgctttttcagcaaattcaatccgagcctctcctgtcagcgcatccccgcctttttcacggaactggtacagggtggcaccgccttttaacgctttttgtacaactgtaacaggatcggctttcgtattgtttgaccccataatgaagtatacagataataactctttcatcatttcccgagaaatacgagtcatgagacagtcaccctttctatagccgcccattcttggacgtcttgttcagtaacagttgaaagcttgttcagcaattcaatctgaaagcttccagggcctttgtcagccgtctgctgtgcggcaagctgagcggcgaccccatacgaagtaatggccgcaatagcagcaaacaatggattttcttccacagcgcaaaacgcaccgacgacggaagtcagcaggcaaccggcgcctgtcacttttgtcagcagcttgtggccgttatgaagggtgtatacatgtgatgtgtcggcaatgacatcgacttcaccagtaatcgcaatgaccgtgtttagcttttgtgccgcttgctgagccagccggatgatgtcgcctccgccttcacccgcatcaacacctttgatcagccaatccgtcacaccgacggtatgggcaatttccgccgcatttcctctgattgcagcaaggcgaacctcacgaatgatgtcacgtgccgattcagttcggaacggtgttgctccggcaccgacaggatcaagaatgacgggaacgccatgttcattggctgatttccccgcgatgatcatcgcttcgactgactccttgctcagcgttccgatatttaaaacgagtgcacccgcaatcttcgccatatcggcgacctcttcttttgcgtacgccattacgggcgatgcgccgagcgcgagcaggccgtttgctgtgaaattcgttacgacattgttggttatgctatgcaccagtgggctgtgccggcggacagcagtaagacattttgctgctgattgtgcatccatgtttgcatcatcctttactatcttttttcgggtcccataaatacgatttcgtatgttcgagccaagctctggcggcaaacgacaagtaccggtcctttctccaaataatggcgaggtgccaagggatgaccggatcgacaagcggaatgactttcactttttccgggtcaaggccgcggcagatccgttccggcaaaagcccgatcccaaggtttgctgataccatctcactgataaaatcccattgtgatgtttcataaatgatatggggccggaacccagccttgatacattccgtcataattcggttgtgcaggacaaaatcctctctgaagaaaataaaaggctcgtccttcaactcacgcagctgacattctttctcatcagccagccggtgggaagggtgaacgacaagcattaaggtttcttttacgattgtaaacgaatgaaagatatcttcgtttgcgggaaggaccacaacgccgatatcaagagagccgtccccgacaccttcttggacttttatagaaccgtcttcgactagctgaaaggtgacattcggatagttttcacggaaatcgccgagcactctggggaaaaaccccgatccgatcatcggcggcagtccaatccgtacgtgccctttcttgacttccataatatcatttaattctgacgtcaggttttgaaatgatttaatgatttcctgcgcctgcacatacatgctatgaccggcatcagtcagttccacctgcctgccgtttcggtaaaacagttcaattccgagctcttcttctaaatttttgatcatttttgatatcgtcggctgagatacataaagggattgggaagccttcgtaaaactttttaaacgggcgacttccaagaaatatgttaaatggcggatatccatgtgcttcaccctttctatagacaaaaggaatacttcttattcttaatatatattttacctatagagagaccttatgtacaataagtatataagggaggcatcaatatgaaaaaactgttgctaaccgttattcaaatcgctctgttatttatatttgctcggctgattaattgggtgacagcccttcttcatataaatattcccggcagtataatagggattgtgattcttttcacattattgcactttaacattatcaagcttgaatggatcgagcttggtgcagcgtggcttctcggggagctgcttttattttttatcccgtctgccgtcggagtgattgaatacggagacattatgtcgaaatttggtgtcagcattctgcttgttgtcatcatcagcacgtttgtcgtgatggtgtctacaggaacgcttacacaactcattgcaaagagaaaggagaaaaagcatacgtgttcatcggaattgtaagtttgtttttaacggttttggtgtatttaggagcaaaaaaggtatatcaacgctttccgcgtgtttatacgtcgccgctattggtgacgcccgctgtgttagtcggtctgctgctgctggtgaatgtcccgtacgagtcctataatctcggcggcggattgctgaccgatatgctacagccggccaccgtggcattcgcgatcccgctatataaatatttccctgttttaaagaaatacgcagtggaaattattttgaatgtggccgtcggttcatgcatcgcgattatttctaccgctcttattgcgaaatggcttcacctcggcaccggcttaattgacagcctcgtcccgagatcagtgacaacgccgatcgcgatgaacgtatctgaaatgatcggcggaatgcctgccgtcacagccgtgtttgtgattttaaccgctttgctcggcacagtgatcggcccgatggtcatccgctatttccgtattgataacgaaatcgcgcggggcgtgctgctcggcacaagcgcacacggagcgggaacgtcaaaggcatttgagctcagctctgtgtccggcacgatttcaagcgtatcgatgatcttagctgcgattatgacgctttgcgcggcgccgtttttactttcatttatgtaaaaaactgtcctctcgagggcagttttttttatgtgcttccccttattgaaaagctcgcaaattacaatataatgtaatttgtggataccaaaggaggcaccctgatgcacaacttgcaggtgaggcggcattacgccgcgttaaaaggattttatttgtttgcttttctcggtacgggcagcatgattcccttactcagtatgtatttaacgaaggaacagcatttaagcggatcacaggtcggcttgatcatgtcactgggcccgattgtgatgattttctttcagccgttttggggcatgctcagcgactatacgcaaaaaacgaaaggcctgctggcggtttgcacatcaatcacaggcatcattggattagcctatattgcatttgacagtttccctctgtttattttgattgcggcctgttttgcagcctttcaaagcacgattattccactttcggacagcatttcactaaggtacacacaagaaacaaatggcaactacggcggaatccgcctgtttggttctctcggcttcggtgtcgcggtgtttgccatgggacaggtgacgaaccagctgtaccccattcacgtgatctttatctttggctgtgcctttctatgcattgctgccatattggcttcacaaatgcccggccagcagaaaacaacaacaaaagtcaatatccgcaaaggattccgggagcttatcagcaacaaaactttcctcatctttatgatcatcacctttacgacatttgctccaaacttagcgaacaatacgtatttcagtctttttctggacaaaagcggcgcgtcactttccgctatcggcattttatttttcatcggtgtcatttcagaaattccatttatgagattcgcccaaacatttatagataaaatggggctgctcaacgtcattatgctgtcaggcggagtctcattattcaggtgggcgctctatttcacggcgccttcactatggatcatttatgtgacggtctttcttcagggagtggccatcggtttatttatcccggcggcgcttcaatatgtgaaaaagattaccccaagacacgttgaagcgacagcactgaccatgtacgccgccatcggcaacgggttcggcaactggttctgcacatttgcaggcgggtatatttttgactacgtatcgattttcgcagtctacttgctttttggcattctgagcatagcaggctttggcctgacattatatttaatgaaggctgaaaaaaacaaacatacacttcatcagccggctgttacttttaaaccataatgactataatgaacaaaagaaaggatgtgcgttatgaacgggcaagagcgaaacagcatttcgaaagggttgcaggttgatattgtattgaaagcagatcaaaaaacaggaaaactgacgagagggacagtgaaggatattttgacgaaatcaagctttcatccgcatggcattaaagtccgtcttgaagatggccgcatcggccgcgtccagcagatcatttctacataaaaaaaagctgcccctgaacagggcagctttttcattattttttctgcagaaggaccactttcaggtagttgccttccggaaatgccgaaatcgttttgaaatcctccggcagcgtaaattcctcaatgatggtgtagcgttcgttcgtttctttaaaggcggcatcgataaagcctttgaatttcttcatgccaaaggcgctgctgtttgtagaggcaacaatgacacccttgtcagcagtgatggcgatcgtttccttcagcaggtttttataatccttggccgcgctgaaggtgcgtttttttgtgcgcgcaaaggaaggcggatcgagaataatcagatcaaagcgcaaatccttttttgcagcatatgaaaaatagttaaacacgtccatcactttaatgtcgtgcgcttcgtaatccagcttgttcacgctgaattgctcgatcgttttggccagacttcggtttgccacgtcgacgcttgttgttttctccgctccgccaagcgccgctgccacggagaatgcacccgtataagaaaatgtatttaaaacggttttcccttttgcatagcggtctctgatcgccttgcgcacatgtctctgatccaaaaagatgcccgtcatggcgccttcattcagatccaccgcgtattgaatgccattctcctggatgatgatcgggaactcgccccttctccctttcacgaagtcatcatcttcaacgtattgtccagccgtgtcgaagcgtttcttctcgtaaatcgctttataatcaagatccagctcatccaatgcggaaatcagcatgtctttaaaggtgtaaattcccttgctgtaccattgaatcagcaggtagccgtcataatagtcgatggtgacgccgccgacaccgtcgccctcaccgttgaacaggcggaaagctgttgtatcttgagcctcaaatagtttggcgcgcgcttgggccgcttttgttaatttggtgagaaaaaatgcctggtcaacctgttcatgtttattgcgggtaagcgtccagccgacccctttgttttgcaggccataatagccccgcgcgagaaactcgccgctctcagacacgatatcaacgaggtctccttctttcatgtgccccgcactccctgcgagagcttctttttcaataaggggatagcctttttttattttggcagcgtgtgctttttttagggtgagtagcttcatatatgtcgtcctctttctgtttgctttctcttatcgtaccacaaaacgccaagatgtctgcattgacagaaaggaaaggtttttctacgatagacaaaaagagtttcgaggaggagcagcatgccaaaacgaattgaccatacaggcatcatggtaagagatattaacgcgtccatcacattttatgaagaggtactcggcatgaaattgaaggatcgcatcacacacacgaacggtgtaatcgagcttgcttttctcggctttgaagacggcccggaaacagaaattgaactgattcaaggctacagcagcgagcttcccgctgaaggaaaagtgcaccacattgccctgctgactgatgacatcgcggctgaatatacaaaagcggaaaaaatgaacgcaaaatttatcgacgaggagatcacaacacttccaaacggataccgttatttctatatcgaaggccctgacggtgagtggattgagttctttcagcggtaaaaaaaaagaacgtacattttgtgatgtacgttctttttttatctataccaactgatatacgttgactcatcgcaaatcatagcttcccagcccatacgctcaaccaattcatggatgtttttatctttggctaaaaagacattaatgaatgagtcatatacactcataaacacaaaatccattttctcatcagttaaaacgagctctgctgcggcttcatcaagaaccgtccgcaagttggcctcagttatgtccaaaacgccgcggttttccacaatcggttctgcgtaataaaaccgattggatccgttcgcacctaatacctttaccaaactcggaatatgaaaatttgaaatatgatcctcactgggataatagaggtctccatttatgttttcatgtaacacctcagccaaatcctctctcgcgaactcgtcccttaaagcgcctatcgacgtcattaaagccagcgccagctcagcatgtgtttgaaagccgcaagaagacataaccttcttccaggaaacagccttgcctattcctcttatttcatcatcgtttggataaatatgctcgtaatcattttttctttttgcattctcccatccttcaggcatttggataaaaggagaaaagataagtgcagcagatgagtattcaactggtacttgttgtaagattggtgattcgtcatctaaccatatataatctagcatgcgcacctcctttacatattctaacattctctttcgtttaaaaggagatgatcagccctatgacaggctgatcatctatcacatcacatttttatccccagattcaaccgcactctcttcccgccatttttgatgatcccatattctgaaaaacggatagtagatggcacaggtgatcagcagattcaccagctgcataacggcgcccgacacctttccgcctgtcgccaggtaacctgatatgagcggcggcatcgtccatggcaccgcgattccggccggtcttgccaccagcccggtgctcatgccgatataagtcgcggtaatcgtgaggagcggtgcgatgataaatgggacaataaggagcggattcatgacaatcggcatgccgaaaatgatcggctcgttgatattaaatagcgcagggccgattcctaatcgtccaagctgcttcatttgtttgctccgggagcgcacaagcatcgtcaggacaagcgccaacgtcgccccgcttccgccgacattgatccaaatttgaaaaaactgagtcgtaaaaatactcggcaacgcctcgcccgcttggaaggcaagacggttggcatccatcgcgccgtaccaaatcggcgccatgattccgccaatgatggaagccccgtgaatcccgcacgaccaaagcagcatctgcacaaattcagcgatcaggcttccgccgagactgccgccaaggatggaaagcggtgtcccaagcaggtctcctacgacattgtgcagactctgaaaaggtgtcatttcaatcaaaaggcgcgccagccacacgagaaacacaatgataaagccgggaatcagcgcgacaaacgatttgcttaccgcaggcggcacaccgtctggcattttgaagacgatatttttttgaataatgtaccgatagatttcggttgaaaacaaggcaatcagcatggcgacaaataagcccttgctgccaagtagcgtgatcgggattccgccccctaccatgatggactccgttgagccatccggtgtaaacggcacctcaaacggcgttgccaatagaaatgcggcaattgaaatcgctccggccgaaagggcatcaacaccatagctttccgccagccgataggcgatcccgaaagcggcgatcatcgccataatatcaaacgaagcattgacgggatatccgagcttatcagcccactccttcccaaacacactcgccatgaaatcagcataccccggaatcggcaggctcgttaaaatcaagaagacagacccgataataatcagcggcatggtcaggataattccgtcacgcaaagcgctgaggtgccgctgtccggcaattttcccggcgacaggcattattttttcttccattacccgagtgaatgcgctcatcttaaaagcccccttttcacattgctttgtgaacaacctccgcaatgttttctttatcttattttgaaaacgtttacaaattcatttggaaaatttcctcttcctgcggaaaaaatctgcattttgccaaacaatcctgtctatgaaaaattttttccttctaactattaatctctcttttttctccgatatatatatcaaacatcatagaaaaaggagatgaatcatgaaaaacatgtcttgcaaacttgttgtatcagtcactctgtttttcagttttctcgccataggccctctcgctcatgcgcaaaacagcagcgagaaagaggttattgtggtttataaaaacaaggccggaaaggaaaccatcctggatagtgatgctgatgttgaacagcagtataagcatcttcccgcggtagcggtcacagcagaccaggagacagtaaaagaattaaagcaggatcctgatattttgtatgtagaaaacaacgtatcatttaccgcagcagacagcacggatttcaaagtgctgtcagacggcactgacacctctgacaactttgagcaatggaaccttgagcccattcaggtgaaacaggcttggaaggcaggactgacaggaaaaaatatcaaaattgccgtcattgacagcgggatctccccccacgatgacctgtcgattgccggcgggtattcagctgtcagttatacctcttcttacaaagatgataacggccacggaacacatgtcgcagggattatcggagccaagcataacggctacggaattgacggcatcgcaccggaagcacaaatatacgcggttaaagcgcttgatcagaacggctcggggatcttcaaagtcttctccaaggaattgactggtcgatcgcaaacgggatggacatcgtcaatatgagccttggcacgacgtcagacagcaaaatccttcatgaggccgtgaacaaagcatatgaacaaggtgttctgcttgttgccgcaagcggtaacgacggaaacggcaagccagtgaattatccggcggcatacagcagtgtcgttgctgtttcagcaacaaacgaaaagaatcagcttgcctccttctcaacaactggagatgaagttgaattttcagcgccggggacaaacatcacaagcacttacttaaaccagtattatgcaacaggaagcggaacatcccaagcgacaccgcacgccgctgccatgtttgctttgttaaaacagcgtgatcctgccgagacaaacgtccagcttcgcgaggaaatgcggagaaatatcgttgatcttggtaccgcaggccgcgatcagcaatttggctacggcttaatccaatataaagcacaggtaacagattcagcgtacgcggcagcagagcaagcggtgaaaaaagcggaacaaacaaaagcacaaaccgaaatcaacaaagcgcgagaactcatcagccagctgccgggctccgacgccaaaactgccctgcaaaaaagactggataaagtacagtcatacagaaatgtaaaagatgcgaaagacaaagtcgcaaaggcagaaaaatataaaacacagcaaaccgttgatacagcacaaactgccatcaacaagctgccaaacggaacagacaaaaagaaccttcaaaaacgcttagaccaagtaaaacgctacatcgcgtcaaagcaagcgaaagacaaagttgcgaaagcggaaaaaagcaaaaagaaaacagatgtggacagcgcacaatcagcaattggcaagctgcctgcaagttcagaaaaaacgtccctgcaaaaacgccttaacaaagtgaagagcaccaatttgaagacggcacagcaatccgtatctgcggctgaaaagaaatcaactgatgcaaatgcggcaaaagcacaatcagccgtcaatcagcttcaagcaggcaaggacaaaacggcattgcaaaaacgattagacaaggtgaagaaaaaggtggcggcggctgaagcaaaaaaagtcgaaactgccaaggcaaaagtgaagaaagcggaaaaagacaaaacaaagaaatcaaagacatccgctcagtctgcagtgaatcaattaaaagcatcccatgaaaaaacaaagctgcaaaaacggctgaacgccgtcaaaccgaaaaagtaaccaaaaacctttaagacttgcattccaggtcttaaaggttttttacattctaagaacatcgtacacaacctttttcccatccgcctcacaggcttttcatactattgctatacagccatgaacagcataaaatgaacgttattacagttatcaccacatatggcgggattgtgactgggcaggcaggcaagacccaatgatgcaaagggagtattaatgcctaaaaagcagggcattttaactcttcttttcgtgttgggctcataacggcgccttggacaaccccctattctcatgctccgtcgtcgcgtcgacgcgggcatttttgtcattttcagccgatatttctcacttttttcattttgattgtcaacttttcatttgatacgatgaacaagccgacttttcttcagcaaaggaggttttgattgcttgcataaagagattgcaaaagaattactgctgctcgcaggaggaaaaaacaatattatcagcatcagccattgtacgacccgtcttcgttttgatgtaaaggacgagacgaaaattgatatacatgccattgagaacctgcaaggtgtgcagggcacctttttccgttatgggcttttccagattatcttcggagcaggcgtcgtcaacaaaatatataaagaagtcgttcatgtatgggagaacgcgccttctgaagaacctgtccaccagaaaaaagccagccggaagctgaaccctgccgcagcttttgcgaaaacactgtccgatatttttgtgccgattattccggcaataacagcaagcggcctgctcatggggctgatcggcatgattaaggtgtttcactggttcgctgccggcagcccatggattaaaatgctcgacctcgtgtccagcacagcctttattttactgccgattttagtcggcttcagtgccgcacggcaatttggcagcaacccatacctaggggcagtgatcgcggggcttttgacgcatcctgatctgctggacccgtctatgctcggcagcaaaaccccgtcttctttagacatatgggggcttcatatcccaatgatgggctatcagggttccatgataccgattcttctttccgtttttgtcatgagcaaaattgagaagctattaaaatcgattgtgccgaagtcgcttgatgtcgtgatcattccctttattacggtcatggtgacaggatgcctcgcgctgattgtgatgaatcccgccgcgtccatcatcggccagatcatgacacaatcgatcgtctatatttatgatcacgccggcattgccgccggagctcttttcggcggcatctactccaccatcgtcctatctggattgcatcatagcttttatgcaattgaggcaacgctgcttgctaatccgcatgtcggtgtcaactttttagtgccgatatggtcgatggcgaatgtggcccaaggcggagcggggcttgcggtattcctcaaaacgaaacaatcaagcctgaaaaaaattgcgctccccgcttctctgaccgcgtttttaggcattgttgagccgattgtattcggggtaaatctcaaattgatccgtccctttatcggagcagccatcggcggtgctattggcggagcatacgtggttgcggtacaagttgtggcaaattcctacgggctgacaggcattccgatgatttcaatcgtgctgccgtttggcgccgctaattttgttcattatatgatcggtttcttgatcgcagccgtctctgcttttatagctacattgtttctcgggtttaaagaagagacagaataactggatttattcgttttcattcataaaacgggggatgaaaggacaaaaaagctatgaaaattaaaagaatcttaaatcataatgctatcgtcgtaaaggatcaaaatgaagagaagattctcttgggtgcaggaattgcgtttaacaaaaagaagaatgatattgtcgatccgtcaaaaatagaaaaaacctttatcagaaaagatacacctgactataagcagttcgaagagattttagaaacattgcctgaagaccacattcagatttctgagcaaattatctctcatgccgaaaaagagctgaacatcaaaatcaacgagcgcattcatgtcgctttttcagaccatctttcttttgcgattgaacgcctgagcaatgggatggttatcaaaaatccgctgctgaatgaaatcaaagtcctttatccaaaggagttccagatcggcttatgggccagaacactgattaaagataaactggggattcacattcctgatgatgaaatcggcaatatcgccatgcatatccacacagcaagaaacaatgccggcgatatgacacaaacgcttgatattacaacaatgatccgtgatattatcgagattatcgaaattcaactgtctattaatatcgttgaagataccatctcttatgaacggctcgtgacccatctccgctttgccattcagcatatcaaagcaggcgaatccatttacgagttggacgcagaaatgatcgacatcattaaagagaagtttaaggatgccttcctgtgtgccctaagcatcggcacctttgtgaagaaggaatacggctttgagtttcctgaaaaagaattgtgctacatcgccatgcatattcagcggttctaccaacggtcagtcgcacgctgagacaaacaaaaaacgcttttgatcatctcaaaagcgtttttttatatctgtattattggttgatcgccgggttgctgatcgtattccacttcgtataggacatgtaatggaaatactcatcgcgatacggatgttttgtattggagttccaaggcttttctccgccgcagaagtgcacgattgccgggttttctctcgtttcattatattgcttccgccctaacagagtcgatggggttttcagctttaacatgatataggtttgagcgttccagcgcggatgaagttcataccactgatcatataaaatcgcattcagtgcatcttggtcatgcagcacaagaaagtcttcgtctgggtgttcattgataaagttgatgactttttctgtgatgttttgctttctccaagactcaaaatcaataatcatgatacctgagttaaaatacttccctgtatcagtgacgttcatttctttcaggcgttcatgctgccccgcatcctcaacagcggctacggtgtatggcgcaatgtctaagtcccatagcttagaaatatcctctaggacaagcgcatcacaatcgatgtaaatcattcgtttgatgctttcatccttaattaagtcgggaatcgaaatgcggtaatacgcggcttttgtaatatggctgctctctaccgcatgttcatacattttggtatccacttctaaaaactcaatcggcactccgaatttcaaagtggtttcttccagtctttttttgttatcaggcttaattccgccatcaatgacgtataattttacctctctctcctgatccatgttagtcaataaagaaacgaacatcccacctaaatgacgagcataattatcatctgcgcatgatacgatatgcatgatttcatctttcctcaatggtattcatctccctttttgttgtacaagttacataccctttttcaaaaaaataaacacgttctccgacatttttttaaacagaatgtgtgatacaacaaaaaaggtgtcattttttgaagatgcgataaagccagtaaagaatgaaaaagcttgcgattgtgatggcttcagccgagacgatataccacggccatggcccgagaacatctaagagagaggatccgcccggttttttcgtcaaatacatataattcgcgccaagccagcgatcaatcaggaaaatacagacgccgtacacattaacaagcaggactgtcacccataacgagcgctggcccattctgtaggtgccaatcacagccatcagcagacaggataaaaacacagacccgtgagaaataaaaaagaggatatatcggatatgcggaaatgaaaacattccgaggtcaggagtggcaagagcctgaatcgaactgccgatgccgacaaaaaacaaaaacacaaacagctttctgctttttgtcactaacataatagctgacaaatacaccgacaggtcactaagctggagaggcaatgaagtgcgcaccgaccacctgcccgtggcgaccaaccatatttgatagccgatttgcgaaccaagcaaaagaaacacaaacagagaacgcaaaaaccggctggccctcggctgcttgaccccctcttggaacaaaaccaacagaatggccaaaagggcgataatcgctaacgtcactacatgctctgtcgaaaacagatgaaacggatcatgcttatagacggattgaacatatttttgcaaaactgcacccccgtttgcggttttttgtttattttggcgttgtttgggctttttttattcaaccgatatatgggcttgaagttcacatcatcctctgttacaattcgtttcatagctaatgattctgataatttaaggcaggtctaaaaaatggaacgttcacatcaacatcagcagcttcggaaggaagaacacgatacactttctaagctcaaacaaatgcccgtcgagtcactcaacctggaagccatttcgatcgctacgaatctgtatcggtctgcacaaaggctccgtgtcaaaatggagactgaggttctttcttcctataacctttcttggaccgctttctccattctttatgatctatgggtatggggagcgctcgaaacgagaaaaatcgctgagctgtcagggatatctacagctacagcaagcaacgtgatcaaaacgctcgaaaaaaagagtttttgccgtaaaagcatcgacacaagagatcggcgactcgtgtttgtctcaatcaccgattccggcaaacaagcgatcgaagaactctacccggagtttcacaaaggggaaacagagctcattgcgggaatgacgaaggacgaacagaaaatattgacagggctgcttagaaaggtagctgacaatcttcatacaacataagctttgacgggaatccagtagcggtttgtctccctgtttcagagagccggcggaaggtgcgagccggcacacagcaaacgtgaattacctccccgagctttctttgtgaccttaaaagtagcaaagaacgggaaaccgttattcgaatgagcggaagacgatgtcttcaaccagggtggtaccgcgtgcattgagccacgtcccttatcgggatgggctcttttttgtgtttgtaaaaaaggaggaaaaatgatgaaaacatttgagcagctcacagcgtcacagcaaaaagaggtagaaagacagcttcagctatacatgacaggcgcccacgaagtcataccgccggaggaattaaaggcaaagctcgtgaaatcaatttccacgggcacgccgcttaaaattaagctcggattagatccgtctgcaccggatgtacatttgggccatacggttgtgttaaataagcttcgccaatttcaagaaaacggccacattgtccagctgttaattggggatttcacaggaaaaattggtgatccgaccggaaaatcggcagccagaaagcaactgactgatgaagaagttcagcacaatgccaaaacctactttgagcaattcggaaaagtgcttgatccagaaaaagtcgagcttcactataactcaaaatggctgaaaacattgaatctggaagatgtcattgaattagcagggaaaataacggtagcccgcctgatggagcgcgacgactttgaagaacgcatcgccatgcaaaaaccaatctcactgcatgaattcttttacccattgatgcagggatatgattctgtcgttctcgaaagtgatattgaattaggcggaacggatcagcatttcaatgttctcatgggacggcatttccaagaacgatacaacaaagaaaaacaagtcgtcatccttatgccgctcttggaaggcttggatggcgtcgagaaaatgtcgaagtcgaaacacaactacattggcattaacgaacatccaaacgacatgtacggaaaaacgatgtcactgcccgacagcctgatgaaaaaatacatccacttggcgacagacttagagcttgaagaaaaaaaacagctcgtaaaagacttagaaaccggcgcagttcatccgcgtgatgccaaaatgcttttagccaaaacaatcgtccgaatgtatcacggagagaaagcagcagaagctgccgaacactcgtttaaaacagtctttcaggaaaacagcctgccggaagatataccggccataaactggaaaggtgaaaaaacgatagcgatgattgatctgctcgtcaagctaaagctcctctcttcgaagagcgaggcgcgccgcatgattcaaaacggcggtgtacgcatcgacggagagaaagtaacagatgttcacgccaaagcagagataagagagaatatgatcatccaagtcggcaaacgcaagtttttaaagctccaatagtctgatattccgaaacgcttatgacccttcattcataagcgtttttttgcaggtataaagcagtcttttcaaaaacgctctccatcttgcaggaaactcctttagcatcccgaaatattccccaaccatacatttaggggaggtttatttttgatgaaaaagcttttgactgtcatgacgatggctgttttaactgccggcacactgctcttgccggcacagagtgtcacccctgccgcgcacgctgtacaaatatcaaatagcgagcgcgagcttccattcaaagcaaagcatgcgtactctaccatttctcagctaagtgaagcaatcggccccagaatagccggaactgcagctgaaaaaaagagtgccctattgatcgcctcatcaatgagaaaattaaagcttgatgtgaaggttcaacgattcaacattcctgaccggcttgagggaacactgtcttcagcaggacgcgatattcttctccaagcggcatccggctcagctccgactgaagagaaaggactgacggccccgctttacaatgcgggattgggctatcaaaaggactttaccgctgacgtcaagggcaaaatcgccttgatttccagaggagacctgacttattacgagaaagccaaaaatgccgaagccgccggagcgaaagctgtcatcatttataacaacaaagaaagcctcgtgcctatgacgccaaacctgtcgggaaataaagtcggtattccggtcgtcggcattatgaaagaagacggcgaagcacttacccagcaaaaagaagccaccttaaaactaaaagcattcacaaaccaaacctcccagaatatcatcggaatcaaaaaaccaaagaacatcaaacatccagacattgtgtacgtgacggcccattacgacagtgttcctttttcgcccggagcaaatgacaacggctcaggtacctctgttatgctggagatggcgcgtgtcttaaaaagcgttccatctgataaagaaatccgctttatcgctttcggcgccgaagagctcggcctgctcggctcctctcactatgtagatcatctatcggaaaaagagctgaaacgaagtgaagtgaacttcaacttagacatggtaggcacaagctgggaaaaagcgtctgagctgtatgtcaacacattggatggccaatctaactatgtttgggaatccagtcatacggctgctgaaaaaattggatttgacagcctgtctctgacacagggaggatcatctgatcatgtgccattccacgaagccggcattgattccgccaactttatttggggagacccggaaacagaagaagttgagccgtggtatcatacccctgaagactcgatcgaacatatcagcaaagaacgcctccagcaagcaggcgatcttgtgacagccgctgtctatgaggctgtgaaaaaagagaagaaaccgaaaaccattaagaaacaaatgaaggcgaaagcatctgacatttttgaagatatcaaataaaaaaagacggcacttgggtgccgtcttttttttataatgatcagctgtttagccgtctataagtaaagctttcagtttatcaactgtattttctttttctaacgggcgataaatggtcagtttcaaatcaggagagtcatatatttgtaatgtcatatgctccatcaccattgttccggctgccgggtgatgaagtactttttctcctgcgtgtgtgcctaatacttcgtggtggttccaccattttttaaattccgggcttctttcagttaactcatcgatcagctcttttatccatgcttccccaagaaaccggctggctgtcgatcgaaactgtgcgataagttttttggcgtggctttcccagtcgtcaagcagatcccgatactccttcgaggtgaaacatcgccatatggcattcctttccttactgcccatttggccaaaattgccgaacacagcacaagctgctgtgttccaagcaataacgtcccacttttcgtcagtcacataaacagggcaattggttaaatgatcaataaagtgccgcacagccagaggaaggctcttattatcttcatcctgatcatctaaaggaacatgatggccagccaacagaaagacatgacgcttttcctcataattcaatttgagcactctcgatatgctttccagtacctgtgttgatacccgaatatcccttccctgctccagccatgtgtaccatgtgacacctataccggacagctgggctaattcctctcttctcaagcctgttgttttccttctggtacccataggcaatccaaactcttgcggagaaagctgtgcccttttcagttttaaaaactcccctagctctttccgtttttctgccatactgtccacatacacactctccttttgcatagaatttcctattagtattctacataaaaaggagaaggtttttatattatttgtttcgttctccaaatacttcagcggccacaggaagaatggtattcagtgcattcggaaaacctgagtaaataatcatctgcatcatgacttctatgagttcttcttgtgtccatccgacattcagggctccgttaatatagaattttagctgctgggtattgcccaatgcagtcaatccagcaacggttgctaataatctggatttcagatcaagacctggtcttgaaaaaatctgaccgtagttaaactccacggcaagcacaccaaggtccggagcgatggaatgtttaaaattgtccacgatcgcttcatagttctcctcatcaatttgtttcagaatatctaacccttttttataacgttcacttgttcgcatcagcttctatctcccttccaatatcgcttttttagtagtacggtttatggtaatccttgaactgaaggcaataccgaccatgatcatccccaggatacaaacaccgttccaatgaaacagcatccagaccgcaccccctgcatacgatcccaaggcgccgcctaaaaacgtgctgaccataaagaggccattcaatctgctcctcatttcagccgacaattggaaaatctccgcctgacacgccacctgattcgcctgaatgcccatggtgatgaataaagcgcccaatacaatcacaatcaatgaagtctggcctgccattaataaaacaaatgacaataaggtaaaagacatacaaagcttgttggaaaaagcagctcctttttgatcaataatccggccgatcagcggagttgcaaaagccccgccaattcccaccaaaccgattgttccggcagtctggctgccaaacgagaatggaggttcactcaccataaacactaacgtcgtccaaaataaactgaaggcgccgaacatgaagccttggtttacacatgcttttcttaacactttctccttgatcaaaagcggaaataatgaagaaatgagttttccgtaatgaaatgcatgtgtccctttgcttttcggaaagcagaagtgaatgatcaacataatgatgacggctgctgcacaggcaatccaatacatcacgcgccagccataatgggcatctatcgccccgctgaccactctcgcccctaaaattccgcaaaccaagccgatagctacgtttccgagtacttttcctctgttcctgtcatttgctaaacctgccgcaaacggcacaaggatttgaggaataatcgtgaagaatcccaataataaatttgtgatgactagccatggaaagcttacagctaacgctgaagctgccgaacaaacccccactaagaatagcaggctcacaattaagcggcggcgttcaaaaagatctcccaatggaacaagcagaaggttccccgccgcatagccaatctgcgccaatgtagcaatcattccagcttgtgccggcgtcatatgaaacgtgcctgccatgctgacaagcaatgtttgattgatatagacattggctaccgtaaacccgctagtcaccgcgataagaaaaatcaaacctctcgataatgaaatggaatggttcatgtttacctcctttcttcatgcatgataaagcaggttcaatcatggaaacagaagtgagtttatactggtataaaaagtactagcaagcaaagcaaaaaagcgaaaccctgtcaggcttcgcttttgttatcaatccacttctttcttaatccccagcattttctcatctaggtaatgggcaatctccgcggcttccttcagctcatctgttaattgcttaggaacgtcattgttcaatttatagtaaattttatgttcaaggctcgcccagaaatccatcgcgattgtccggatttgaatttctgctttgacgtattccacacggttcgttaaattcacaggcatctcaatgattaaatgcaggcttcgatagccattcggtttgggtgtctggatataatcctttacctttacgattctcaaatcttcatgctgcttcaacacattcacgacattataaatgtcagaaataaaggaacagatgatgcgcacgccggcaatgtcgtgaatatgctccttcatttccttcgtcgtaatctcacagccctttctcattaacttattcacgatgctttcaaagcttttgacacgggattttgtatgttcaatcgggttgtgtccgtgaatgaggttatattcctggctgataattgagaactttgtatcgagcgcatctagcgcaaatttataaactaataattcatttttccaatcttccattactgtttttaaatcgtccatatgtgttacagataaatccattttcgtcatctcctttaacggaactttatccgctgtccatgtactagacgtccctgtctgctgcaaggttctatgaatttttttacaaaatgcggtcgattgtaacaaaaaaagaccgcacgaaacgagcggtcttttttattatcggaaatagctgatcaataatccgatcgagagcaggaatccgaaaaatgtatttgtttgggctgttgatttcattgcgacaatcatattcatcggcatttcgttctggacgaaacccttcactgcctgaaccggcttaggcacgctcaaaaagacgacaaacagccatgggcttgcggcaccggtaataaccaagccgacaacccagatataagcgacggcaaacgacgcagctaacagagtaacagctcccttatgccccatcaaaatcgccaatgttttgcgtccgccttttttgtcctcttcaatatcacgaatgttgttcgacaggttaatcgcgccgacaagaatcgcaatcgggatggaaatcaaaatgctttgcgtgttgatcatatctgtctgaatgaaaaacgaaatcagcacaaacaccgaacccatgcaaatgcctgagaataattcaccgaacggcgtgtacgcaatcggcagcggcccgcctgtatacaggtagccgatcgccatgccgacaaggccgatcagtgcaagccaccagctgctgcttgcacaaatatagacaccgagcaaaatggcaatcccgtatgaggcaagagctaattgcaaaatcgttttaggcttcattccgtggcgtacaattgcccctccgattccgactgattctgctgtatctaatccgcgtttaaaatcatagtattcattaaataagttcgtcgcgatctggatccataggcaagaaaacagcatagccaaaaacagcagcagatcaaccttcacataaaacatcgccaaaacggttccgagcagcacaggcacaaacgatgcggttaacgtatgaggacgggttaactgccaaaggatctgccccatgctttctttttgcggcgctgtctgaccctcacccttatttgtttggttcatcttcctcttcctttctattaaaaggcttactttttttcagccggcagcttaataaaaaactccttttgcttccttatctatcataatgacttctcccttatttcacaagataccgcaagaaggcgttttctttcttattatacgcttctcgccctgatttcattaggtttctgctttcacttgaacgaacaggtacagaaaaatttttttaagtacattacactttttaaaagttaaaaagatcttttgactccagctatcttttcctttattatgaatcagctcgaaacattccattcttgcccttgcaggtataaagattcattttcaaaaacatacgccgatatattaatttgagggagattagggaaaaaatgaaactttttgagcatctgatcgtcaaataatcatgtgattgtcgaaaaaacgggaagggaatttttgatatgctgcaattaatgaaacagctgtatgaaaaacccgctgtcaagtggacatgtcatacaggcttttatttgatgatactgcttgttttgttttttatgtatggttttcacaccgcgaataccggttcatatatttataacgatttctaattggagagagaataactatgaaacttttacatgctattcaaacacatgcggaaacttatccgcaaaccgatgccttccgctctcaaggccagtcgctcacgtatcaggaattatgggagcagtctgaccgcgcggctgccgcgatccaaaaacgcatttctggggaaaagaaatctcctatccttgtgtacggccacatggagccgcacatgcttgtttccttcttgggaagtgtcaaagcgggacatccttatattccggttgacctgtccattccgtccgaacggattgcgaaaattatcgaaagctctggagcagaattgctgatccatgcagcaggactctcaattgatgcagtcggccagcagattcagacagtttctgcggaagaactgctggaaaacgaaggcggctctgtcagccaagatcaatgggtcaaagaacacgaaacgttttatatcatttacacttccggaagcacaggaaatccgaaaggcgtgcagatttccgctgcgaaccttcaaagcttcacagactggatttgtgcagactttccagtcagcggaggaaaaatatttttaaaccaagcaccgttctcatttgatttgtctgtcatggacctatatccgtgccttcaatcaggcgggactttacattgcgtgacaaaggatgctgtgaacaagccgaaagtcttatttgaagagctgaagaagtccgggctgaatgtgtggacatcaacaccttcctttgtgcaaatgtgcctgatggatccaggtttttcacaggatctgctgcctcatgcggacacatttatgttttgcggagaggttcttccggtttctgtggcaaaagcgctgcttgagcgttttccgaaagcgaagatttttaatacgtacggcccgactgaagcgacagtggctgtcacatcggttgaaattacggctgacgtcatcagccgcagcgaatcgcttccagtgggcttcgccaaaccagatatgaacattttcattatggatgaacagggacagccgcttcctgatggagaaaaaggagaaatcgtcattgcagggccgagtgtaagccgaggctaccttggtgagccagagctgacggaaaaagcgtttttctctcatgaaggccagtgggcataccgaactggcgatgccggctttattcaagacggtcagattttctgccaaggacgtttggattttcagattaaacttcacggctatcggatggagctggaggaaatcgagttccatgtcagacagtcacagtacgttcgctctgctgtcgtgattccttatcagccaaacggaacagttgagtacctgatcgctgctattgtgcctgaggagcatgagttcgagaaggaattccagctgacaagcgctattaaaaaagagcttgccgcttctcttccggcatatatgatcccgagaaaatttatctatcaggatcacattcaaatgacggctaacggcaaaattgaccgaaaacgcattggcgaagaggttcttgtatgacgccttacagctcgtttttattctttatactgcttggcattcttcttctgccgacgatcattctcggcttaaacggaaaaagatttcaagcatacaacatgttcatatctatcattatattggctttaattttttcgcatgacttacacggggtcatcgcgctgtgcctgtttacaatatggcaggtgctcctgatcagcggctatctggcataccggcagaaagcgaacagcggctttgtcttttgcggggctgttatcgcgtctattctgcctttatttctgtcaaaaatatggccgtttctttcacacccgcagccgcatcatccgccgcataacctgatcagctttttagggatttcatatttaacctttaaaggcgttcagctgattatggaagcaagagacggactgctgaaagaacagctgccattgcaccgcctgctgtatttcatcctgtttttcccgacgatttcctccggcccgatcgacagataccgccggttcgtcaaggatgaacagaaggcttggacgaaagaagaatacgccgacctgttgtatacgggaatccataaaatcttcatcggtttcctgtataaatttattatcggctacgcgatcaatacgtacttcatcatgaatcttcccgcaatcacgcacaataagattcttgggaacctgctgtacatgtacggctacagcatgtatttattctttgatttcgccggctacacgatgtttgccgtcggggtcagctacattatgggcattaaatcaccagaaaactttaataaaccatttatcagtaaaaatattaaagatttctggaatcgctggcatatgtctctgtcattttggttcagagattatgtgtttatgagattcgtattttggatgactaagaaaaagtggatcaaaaaccgtatggccgtctcaaacatcgggtatttcctgctgtttatgctgatgggggtttggcacgggctcgcgccgcaatatatcatttacggcctctatcacgccgtgctgatgacgtgttacaactttttcgagaagtggaataagaaatataaatggctgccgtccaaccgctggacaaccattctcgctattgtgatcacattccatttcgtttgcttcgggttttacattttctcaggaaaaccatttcatcaccaccattaaaggagattagaaagctatggattttaaacaagaggtattagacgttttagcagaggtttgccaggatgacatcgtaaaggaaaatcctgatattgaaatttttgaagaaggtttgcttgattcttttggaacagtagaattgctgcttgcgattgaaaaccgttttggtattttagtgccgatcactgaatttgaccgggacgtttggaatacacctaacaacattgtaaatcagctgtctgagttgaaataatgaaaaagcgttttttcggtccaattattttggcgtttattctattcgcaggcgccatcgcaattccatcttcatggctgacaggcttcatcaccgataagcgtgtgaaagagtcagcaacagccttgaatccgagtatgtttcaagggctatatttacaagatcagatgctcaaagatccgacatatcttccgatttacgggtcttctgagctttctcggctggacgagttccacccatctaattattttcaggtaaacaatgagggattcacgccataccttgtcggcaaaggcggatcccagtcattgattcattctttaaacttcgctgcccatatggatcagctgaagggcaaaaaaatcgtattcatcgtgtctccgcaatggtttattaagcgcgggtctgatgaacagcatttcgcgccgaactattctgcgctgcaagggcttgatttggcatttaacgatcagatcgatcctgaaattaaaaagaaaatgatgaaacgcatgctgcgctttaaggctgtgcaaaacgatgccattctttctgagctgtacaaagcaatggtaaacggccagacgtggaaagtgaacgcgctgaagccggcggcgaaagtgtattacagcatgctggaaaagaaagatctgtattattcaacgacagaatcatccgggccaaagcgctatatctcgcagtcagtaaaggataagtcatggtctgaattgaataaactggcggatcaatcgggcaaacgccactccggttctaacgattttcacatcgacaaccctgtctataaaaagctgaagccgaaagtgcctaagctgaaagggaaaaacaaaggaagatcgtatgcggtgtcaccggaatatggcgactttgaaatgatgctcgatatcctgaaggatgcgggcgcagagcctatgtttgtcaccattcctgttaacgggaaatggtacgattacacgggcttcccgaaaaaaggacgcactgactattacaaaaaggtaaataaacaaatcagagcgaagggcttccaggttgctgatttctcagggcatgaatatgacccgtatttcatgaaagacaccattcacatcggctggaaaggctgggtgtatgtcgataaagcaattgacgaattttataaaaccggaaaagtcacttcatcctgagcatctcataggacgcggctgcatatttcctgctaagatttgaaatagtaaagaaatcacagccaacttaattaagaggtgttacatccaatgaagatgacaggcaatacggttttaatcacagggggttctgctggcatcgggcttgaactggccaagcgcctgctggaacttggcaatgaagttatcatttgcggacgcagcgaagcacgtcttgcagaagcgaagcagcagctcccaaacatccatacaaagcaatgtgatgttgcagaccgttcgcagcgggaagcattgtatgaatgggctttaaaggaatatccgaacttgaatgttctcgtcaacaacgccggcattcaaaaggaaattgactttaaaaaagggacagaggatctttttgtggacggtgatgaaattgaacttaatttccaagcgcctgtccatttatccgcccttttcacacctcatttgatgaagcagcctgaagcggcaatcgttcaggtcacatccgggcttgcgtttaacccgttagctgtttatccggtgtactgcgcaacaaaagcggcacttcactcgttctcgcttacgctcagacaccagctccgcgacacgagcgtggaagtgattgaaatggcaccgcctatggtggacacgggcttaaaccaaaaatcacgcgataaacaaggcctgacgtaccggggcatttcatctgaagaatatgttcaatatttcttggacggcttgaaggaaggcaaacaggagattacaaatgaacgggttgaaggtcttcgggatgccactcgcgccgattatgacaggttattcaagcaaatgaacacgcaggagaattaatttctcctgcttttttcatatgaatttcttacaaatttgagcaaacctattgcgattatttgttgaaggtatacaatagaatataattattttcaaataagtttgataatataaacaatttaacagcagggagattgaccatgactaaacaaacaattcgcgttgaattgacatcaacaaaaaaaccgaaaccagacccaaatcagctttcgttcggaagagtgtttacagaccacatgtttgtaatggactatgccgcagataaaggttggtacgatccaagaatcattccttatcagcccttatcaatggatccggccgcaatggtctatcactacggccaaaccgtgtttgaagggttaaaggcttacgtgtcagaggatgaccatgttctgcttttcagaccggaaaaaaatatggaacgcttgaatcaatcaaacgaccgcctctgcatcccgcaaattgatgaagaacaggttcttgaaggcttaaagcagcttgtcgcaattgataaagactggattccaaatgcggagggcacgtccctatacatccgtccgttcatcatcgcaaccgagcctttccttggtgttgcggcatctcatacgtataagctcttgatcattctttctccggtcggctcttattacaaagaaggcattaagccggtcaaaatcgctgttgaaagtgaatttgtccgtgcggtaaaaggcggaacaggaaatgccaaaaccgcaggaaactatgcttcaagcttaaaagcgcagcaggtcgccgaagagaaaggattttcccaagtgctttggctggacggcattgagaagaaatacatcgaagaagttggaagcatgaacatcttcttcaaaatcaacggtgaaatcgtaacgccgatgctgaacggaagcatcctggaaggcattacgcgcaattcagtcatcgccttgcttaagcattggggctttcaagtttcagaacggaaaattgcgatcgatgaggtcatccaagcccataaagatggcatcctggaagaagccttcggaacaggtacagcagctgttatttccccagttggcgagctgatctggcaggatgaaacactttcgatcaacaacggtgaaacaggggaaatcgcaaaaaaactatatgacacgattacaggcattcaaaaaggcgctgtcgcagacgaattcggatggacgaccgaagtcgcagcgctgactgaaagcaagtaagaaaaagccggcccagtacaggccggctttttttacgcttcaattttgttgaaaaactgcggcagatacgctttgtgcgcctccagcatttcatctaaaatctgtttggccacagtatcggacgggacaagagggttaatcgtcatggcaaggagcgcagtttgatagtcacctgtaactgccgcttctgccgcgacacgttcaaaggatttgatttgctggacaaggccgcggacagacaccggcaagtcgccgacagcaattggcttagggccagttttcgtcatcacacagttcacttcaactgcggaatcgtctggaatactcgctattgcaccgttattgatcgtgttcaccggctgaatgtcgtgtttatcattgtaaatcgagctgattaagttacatgctgcatcactgtagtaagctccgccccgtttttccagctgcggcggtttgatcgcaaggtttggatctttataaagctcgaacagctctttttcgaccttctgtacgacttcagcgcgggtgccctccatttgtgatgcttccagttcgtgctccagcatctcttttgttttgaaatagtaacggtgatagccgcaagggatgacattgagcgcttttaagaaatccggttcccattcggcgcctgagatatttttcatcgtcatcgcgtttttcgggtcgcccatcgcctcgatgacttgctccttcacacttacgccatccaagaaaacatccagcccaaataccatatggttcagtccggcgaattggacttctacgcggtccacatctacatcaagcgctttggctacgcccattttgatgccgattggaacattacagagaccgacgactttcttcaggttggagtagcgaagcaaggcttctgttaccatgccggcagggtttgtgaagttaacaagccaagcgttcgggcaaagctcttctatgtcctttgcgatctcaaggatgaccggaattgtgcgcaatcctttaaacaggcctcccgggccgtttgtttcctggccaatcactccgtattttagcggaatgcgctcatcctttgctcttgcctgcaaaagtccgacacggaattgggtcgtgacaaagtctgcgtctttcagcgcttttctccggtcgagcgtaagatgaatgtcgatcgggacgccagctttttcaaccatccgtttggcgagtgtgccgacaatattcagcttttcttcgccctcggggatatcgacgagccataattcgcgcacaggcagctcatcataccgtttaataaacccttccactagctcgggcgtatagcttgaacctccgccaatcgttacaatcttcaatccttttgtcatatgcttgctcccctttgctcggtgattttttcatataactcaatgatctctgcagccatatccttcactgtcattgcattcattaaatgatcctgtgcatgaaccatcagaagcgtcatttccgtcttttctccgctcgcttcattttggatcagctctgtctgataatgatgggcttttgacaattcttcagcagcgtcttgaagctttttccgcgcttcttctgcgtcaccgcttttcgcagcggcaatggcctccattgcggagctcctaccgtttcctccgtgaaggatgatttgaaaaatgatttgttccatttcctcattcacgcgattcacttcctttctctacagagccgcttctttgtcatctgatgctgcaggcgtttggaccagctccagatcgttttcttctttcagcttctgcttatcccacattctgaagaatggatagtagacaacaaaggacacggcaatattaatggcttgcatgaccgcacctgagacttttcctcctgtcgccaagtagcctgaaaagatcggcggcatggtccacggcactgcgatacccgccggttttgcgacaaggccggtgctcattccgatgtacgtaagtgtcactgtgacaagcggtgtgatgataaacggaagtaagagcattgggttcatgacgatcggcattccgaatataatcggttcgttaatattgaagatggccggtccgaccgcaagcttcccgagctgcttcatttgtttgcttcgggcgcgcaggaacatcgtgacaaccagtgccaatgtggcgccgcttccgccgatattgacccagatatcgaaaaattgctgggtgaaaatcttaggaagctcctcaccggcttggaaggcgatccggttggcatccattgcgccgtaccaaatcggtgccatgacgccgccgacaatgtttgcaccgtgaaggccgcaggcccataaaagcattttgacggcttcggcgacaaggcttcctccaaggcttcctcccagaatggaaagcggagtccccaataaaacgcttacaatattatgaaggctttcaaacggtgtcgcttcaacaatcagccgggctgcccaaatcaggaagatgacggcaaagccggggattaacgcgacaaatgacttgcttaccgccggcggaacaccgtccggcattttgaagactaaattgcgctggataatgaggcggtaaatctctgtggacaccattgcgataatcatggcgacaaacaggcctttgcttcccatgagcgaaagcggaatcccgccgccaaccatgatttctttcgtcgcgccatccggcataaacggcacttgataaggtgttgctaataaaaatgccgcaagggaaatggctccggccgacaaggcatcaacgccgtatttctcggcgagccggtaggcgatgccgaacgcggcgacaagacccataatttcaaaggtcgcgtcgactgggtaggccagtttttcagaccaggagctgccaaacgtttttgccataaactcagcgtatcccgggatcgggaggttgccaatgatgaggaaaaaggaaccgatgataatcaggggcatcgtgaggataataccatcacgcagcgcctgcaaatgacgctgtcccgcaattcttcccgctataggcatgaccttttcttctaagatctgattgactttattcacatagcccgcccctctctatgacacatgtccaagctgttcagctgatttcagcacttccgccccgttgcacgtgccataatggacggtattaatgacgtctaccggaaccccctttgactctcctaattttttgagctgcggaagcatgtaacggacttgcggaccgagaagcaatacatccgctttatcgatatgattttgtacagaatcgcctgaaactgcccaaatggtatagtcttttccctgttcctgcgcacttttttccatcttgctcaccagtaaactagtagacatgcctgctgcacaaacgagtaatatattcatgtaaaagaccccctagagtttgatcaattttgtaatgtcctgctgttgctatcatcatattatgaaatcgctttcataaacactcagggtttttccgcaggcaacggaaaaaaggtatatacaggctgtcagctcagcattttttggtcaaacacatccgaaagctcttgaaatgaacggcatttgaccagctggttcaccgccgccgggtcatccaaaatgctgccaagcagtttatacatgctttgcaagtccgctttgttctccttttcgacacaaagcagacagacaaattgaactcgctgactctcccaatcgatcggttttttgagcgtacaaacggcccaaaacgttgttttcgtctgcggaacaagcgggtgcgggatggcaacaagattgccaaaacacgttggcgacatgtcttctctttcaaaaatggaatctatgatttcttcatcggcaaagccgcattcgaccgctttctgccctaaaaattgaatcacttcttcttttgagcgcagatcctcctgaaaaaaaacgagttctttttttaggtagcgattggctttttccttttcatcactcagaatagattctatttttgtaaagtcagttccgcctaagatggtgttaaccttcagtactggtacagggagctcttttttaatcggaatggtactgatgacaaaatcaattgattcgtaggacatttgatcaagactataatactcagccgttccaagaatatcgagccgcttgccgaaatgggaacgcagtttttcgcgcagaagctgggcgcttccggcacccgatgcgcatacaatgatacagcgtttcggcggactttctgttttttttcgttcaatcgcggcgccaaagtggagagccaaatatccaatttcgttttcatgaatctcaatacccgtttgttcctttatcacgattccggcaatgatcccggcttcaaaagcgagtggataatgttccttgatcgctgccagcatcggatttcgaagattcatgccgtatcggttgcggctgatcgccggcttcatatgcagggccaagccgattttcagctctttgtcatgcaggatgccaagcttcagttcacgatcaacagctttgatcatggcaagtgtcagctgatcggtttcctcttctattgaaaatgtgtcctctccgcattgtgattgtgtcattcgttttgtgccaaggagatgcatggtgatgtaggccgtctcgtctttcggaaacgtaacggcaagctttgattccagctcttttacgatggcttctgcagcctggtactccttttgatgcaggatatgatccatatctttcgggaaaagagaaacatagttttccgttctgatccgtttacaggcgatagcgatatggataatgaggttattcagtcccatgttggacagagggatgcggtcgtttttcatttttttcaagatggcggaacggatgatctcaatttcttcttttggcaaaatatcagccttttcatttaaaacatctatctccgtttctctttcatcaacaatgtactccgccatgcagtacctcatctgcacctcgtccccgcgcagcttgaagccgtaattcggacgtgtttccatgacgatgcggtaaggcagcagacgtttctttacttcctttaaatccgtttggagtgtagattttgagataaatagttcttcagcaagttcatcgagcttgagataatggtccgccagcagcagacgtttcataagataggccattctctcctccggcaataccggcaggccctttttttgctgaaattcatcttgcagcagtgttctgaatacttgctcgtcatcaatgcggagcttgtagccggagcctcttacagattgtacaaaggcaccgtggccgcttagcacaccttgaagttcctttatatcattgcggactgtccgcgtcgttacgtttaattgcgcggcaaaaaacgaacttgtcaccggggcttcagccgccatcagcaagcgcagaatatcacgtagtcgcccatgaagcatgagaaaaacctcctaactagtagatgcagggattcagtgaataggcagaaaggatgatgaagggatgcgaaatgtatataaattctataatggagagaatggcaagtcaatgaacatccggaggactagagggaaaactgacctataaaaaaacagccgggatcagccggctgttctagatgcggacatattcttttgtttagacgccttgcggtccttcatgatttttcgaacaatcgggtaaatgaccggcgcccatttgataacggttttgatcatctttttcaaagctccgattctcccttcttttttctcaaccattcccctgattgcctcttccttaaacatgctaacgcgacacgtacctgtttcccgtcacccagaaacgccatggataatcgcgtgcctccccgctgttgtcaatgccgatgcgcgggccggttgaaattgcttccggtgtgtacccgctttcgatgtaaagcggctgttccgtgatccagcgtccgtagtcattcatcgtgacgccaagcgctttcgtcagctttcctggtccgtttgtccattccctcggactcctgcccggccttctctcctccattaacagctggccttcatgcggctcaatcgccctgattaatactgcttgcgggacatcctcttccgccgcaacgacattcagcaatgtatgggtgtgcatcacgtatgtatatacccgcccagcttctgcaaacatgatctcagtccgcttcgtccggcggttgttaaagctgtgggccgctctgtctccagcccccatataggcctctgtttccacaatatagcctgacgctgtgccttcgtctgtttcttttacaagaaggcagcccagaagcgatggggcaagctcaagagcggttttttgataaaacgtgatgggcagcggatttttttctctcgtcacgaatcgacctctccttttaccgatttttgtacattgtaccattcccgaagcagatcaaaaaaaacggctgttttaaaatctttccattcagggaatattgttaccgttcaaaaaaggagggccaaccattgaaagatgatcatcaaaacaagcagcaccaatcaaatgcccaagggagcgaggaagcgttttctcataagacatccgggaaaaacgagtcagaggataccttaacgaataggcaggggcatcctgttactgacaaccagaatgtgagaaccgtcgggaatagagggcctacaacacttgagaactatgattttctcgaaaagatcagccacttcgaccgggaacgcatcccagagcgggttgttcatgccaggggagcaggtgcacatggatattttgaagcgtacggaagcttcggagacgaaccgatttcaacatacacaagggccaagctctttcaggaaaaaggcaagaaaacaccggcatttgtccgtttttcaactgtgaatcatggaaaacactcgcctgaaacattgagagacccgcgcggttttgctgtaaagctatatacagaagacggaaactgggatttggtcggaaacaacctgaaaatcttttttatccgcgacccgctgaaatttccggatcttgtacacgcatttcagcctgatccagtgacaaacatccaggatggtgaacgtatcttcgatttcatttctcaatctcctgaagcgacacacatgatcaccttcttgttttcgccttggggcattccggccaactaccggcaaatgcagggttcaggcgtacatgcctataaatgggtgaatgaggagggcaaggccgttctcgtgaaataccattttgaaccgaagcagggcatccgcaacctgacacagaaggaagcagaagagattcaagggaaaaactttaaccatgccacacaggatttatatgacgcgattgaaaatggcgattatccagagtgggaagtgtatgcacaaatcatgagcgatgatgagcatcctgaactggactttgatcctcttgatccgacaaaactgtggtataaagacgattttccatggaaaccgatcggcaaattggttctgaacaaaaatccggaaaactaccatgcggaagtggagcaagcttcatttggaacgggggtgcttgtcgacgggcttgatttttcagacgacaaattgctccaggggcgtacgtttgcctactctgatacgcagcgctaccgtgtaggcgcaaattacctgcagcttccgatcaactcgccgaaaaagtatgtcgccaccaaccaggaaggcgggcaaatgcaatatcgggtcgatagagcagaaggacaaaacccgcacgtcaactatgagccatccattatgggcgggctgaaggaagcgaagcaggacggaaaagaccatacgccgcatgtcgaaggcgatgtaaagcgtgaagcgattgacagaacaaacaacttcggacaggctggagaaacgtaccggagatttactgaatttgagcggaacgaattgattacgaatttggtgaatacgctttctacgtgccgaaaagaaattcaggatcaaatgattgagaatttcacaaaagctgatcctgactacggaaaacgcgtagcagaagggctaaaaaaggtttccgaaaacaacagcaacgggccgatcggcacaactgaaacggaacaggctgcaaagcaggctgaacaggagagccatccatctaatccgtattaacaacagcgaacagggctttttttgaagccctgtttttttatttttctattgaaacgttttcaacaattgtgttgtactggaaggaaaggggtggagagatacgatggaattacagcaggacttgattcctcagaaaaaaacaatcggcgccttagatcacgccgtttttttatgcatggtattttgtttctggttttcaggctatatttacgttcctgtattcagtctgtatttggaggatctgcacttttcatatggcgcaatcggcatcattctcggcagctacggggtcacgcaaatccttctgcgattcccgctcggccttgtgtcagacatcctgttttccttgcgcaagcaattgttaattgccgggttcggcttttccgtcctcagcagcctgctttttctgatgtttgattctttcttcttcgtgctggccgcccggcttttcgcgggaatcactgcttctatgtgggtgatggcgaccattttatacgcacattatttcaacaatggcaatgcatcaaaagcaatgggcatcatgcagttttttaccgtcatgcctcagtttgccagcattgtgttctgcgggcttgcggcagcccatttaggcaggcaggttcctttttggatggcgctggcagcctcggtcgccggtctggtgatctgctgctttattaaggatccgtctgctcctcccgcaaaccgtgacaccattcgtgtcaatcagtacatcaaagatacattgcagctgccaaagctgaagcttttcaccatcctgtctatgacggcccatgccgtattatttatcacagtattttgttttacgccgctttacatgaatcagctcggaatgggtgacgcggagcttctttgggtgatgagcgcctttttcctcccacacgcagccgccacattaagctttgtgtttctgcgctttacaagccgtatcgcttactccgtgatgctcattagtttcgctgtcaccggggtctgtttgctatatgttcctttttcagctgcattgttcacggtttgcatcacacacgcctgtatcggactggcgctcggcttcgtttttcctctgttgctaagccatgtcgtcgaaatcagttctgcccgattaaaaatgtcagtgatggggttttatcaatcattttatgcgctaggcatcttcctcgggccccttcttgccggaaaaatcgcacagcttgtcgggcttgcgggagttttttatggagccgggtttctggcatttgccgccttttttgtgatgctcgcgcaaaaacgtaacatgatcaattaatagctttcataccgccggaagcgccacacagaaaacacggccagaagcatgatgcacagaatggagaaagtgagtgaccatccgaaaaaatctgcccgctctccatgaagaaggatatgctccgcctgcttgcaaatctcagccggaagccacttcgcaccatctggaaatagtgaaacagcaaaggaaacggctgctgtgagcccgatcccgcaagccgcagctgctccgacagaccggaatatcgtacttccggcaaggccggcggtcacaataaatatcacccaaagcgcgtaaaggccaaggcttgcggcaaagcggctgaatgatgcgtcctcaaacagcagccggacgtaataataagcaagcccgtatccagctgcaaacgacataatgccgatcacgctttggatgagccatttactcacgatataatgggctgccgtcacaggccgcgacataatcagcgctgttaccccttgatttctttcattggctacactgcccatcacgctaaagatgaccagagccatgccaagcgtgttgaattgagaaagcgtgcttaccatcacttcagacccggagggcatcgtaaaactgattttcatgccgtcaggaaggttccctccatgtgcgatgatttccggcatataataaatggtcagcggctgtgtcagcccgacgatcatcatcgcaatcggcagccaaatcagcttgccgcttttccatccttccagccactccttctgcaaaagcgccatcatcaccttcatgcgtgcaccacctttagatagacgtcttctagagactccgttttctgttcaaatcgggtgacggtcaatccctttcggatacagtcacttaataatgaccggccagcttgtatatcaggcagctcgaaaacagcttgggacggatttttatagacaatagctgagacgtaaggcttctcttcaagccagccttccagcttctctttcactgaaagggtaaaaacgttcgtttgctgctgttgtttcagctcctgtaactcgcctttccatgaaatttcaccatttttcataatcaccacttgatcacacacctgctctgcatcgtgcaaaacatgtgtagaaaacagaacggccatatgctttttcagctcccgcatcatgtccagcacctcgaaccgtcctgtcggatcaagcgcagacaccggttcatccaatatcaaaaacttcggtttatggagcagtgcctgtgccagaccgagtctttgtttcatgcctcctgaatagcccccgatctttttgtgcgccgcttcgtgcaaacccacaaattccagcatctcgccgatttcctcttggcattttctcttcgaaaggccggacagtctccccgcaaatgtcaaaaattcatttgcggtcatccaggaataaaaagctggatactgcgggaggtacccaatcaaacgccgatccggctttttttctcctaacagcttaatgtttccggaggttggcgaaagcagaccggccagcatttgcagagtcgtggttttgccggctccattaggtcctaatagtgcgacacactcattttcattcacgtgaaaactgacattctttacagcttcatgatgcctgtacgatttgcataatgattcaatagacagcatatcggcttacctttgctttctgccgacggtaaaaaacaaaatcggcccaataatattgatacatacaatgattgcagcccacatccactttggcccgtttgtccgctcttcttttatacagctgataagggcaaacaccgccaaagccagctgtaatacaatcagcggcaaaatcatttcccaagaaatattcattgcttgatcccccttttcttccgatccggcctaatgacaaaaaagtaataacaaatcagaggcatcggtgcttgaatcaatccgacaatcccccaaacccatgccatgcgattacgttttttcgcatcaataaataaaaagattccctgcgccaatacgatgagacaagccgcaaccgttatgataatttctgtttgtgtcatccgcgtttcacctcgcattcgccgagatgcctttttttctcagccgcaatcaaaatcggcagcaccgcaagcacacaaacctgaagcacaataaacacagcaggagcttgagtgaaagctaagattgcagcactcacaaccatcagcgcgcagaatacaaataaaatgatctcttgaagaagtttttttctgtattcagctttcatttgtgacagctggtgaagcagttctttttgattcggtatagagggattggctgtttgatcaatttttttccattctgactttaaatgatcagaaagcttttctttattcatcgtcccactcctttctgatttgctggagccctttatgaactctggactttacagtgccttctttgatttgaagcatcaccccgatttcagcgtaggtatagccgtagtaatgccttaataaaaccggtgtgcgcagtttagggtccagctttgaaaacagatcgagcgtttcgctccactctgcccctttcgccgacacgtcccacttgatcttgcggattgtttcctccgtaactgtctgattccgtttccattctctctttctctttttctgatgatcgagatagagccgcgatgcaatggagatcagccatgtggagaattttgaacggccctgaaagcttcttaaatggatgtaccctttcagaaaggtttcctgaacaagttcctcgctgagatcggggtgaagggaaagctttaacaagtatttatataagaaagaatagtgatagtggaaaagggctgtaaacgcctcgtcgtttccctctttcgcctgctggatcagccgctgttcttcatgtgtatccaatgaccgtgatccccccttttttgtttttctgccttatgagacgacaccggattcaaaagcgttcatcttttttacaattcttttcagccattgacagatcaggcttcccggccgtttggctgcatatccttatttgtaaacccccttatagtctgttaagctatgactttatgtcgatttcaaaaaaacatccaatatggaggacgatgcattgaaagtagaaaggcgaacgattgaatatattccgaatgaagaaagacatggtaaagcgaaagatttatttcccgtatggttcggggctaatatgcatatcaccacgttagtgaccggcacgattcccgttgcaatgggacttaatctgttttggagtgttgccgctattatttgcggaaccttaatcggtgccatatttatggcgtctcattccgcgcaaggccctcagctaggcatcccgcaaatgattcaaagccgtgcccaattcggcgtaatcggagcgattcttcccctcttcttagtcatgtttatctaccttggtttcttcgcaagcagcacgattctggcggccggaaccttaagcagctttgttcccatcccgggatcatggagcattataggcttaagcgccttatgttttttactcaccattttcggccatgatttgattcacaaaatgcaaaaaatcctttcttggacctcttttgctgtattttttgctgcaacgattctcatttttcaattgccgattccggcaggcagctggattcccggagcgattgatctgccaattttcttggtggcagtcagcgcagttgcgacgtggcagcttgcctacgcgccatatgttgccgattattcaagatatctgccagttaaaacaccggcttcaaaaacattttggtacagctatgcaggtacatctgtcagctccatctggatgatgctgctcggcgcattgctgacaacctcacttcctgactttacggcaaactcaggcagccagattgtccaattgttcggtcccttctcgtttattatgctgatcattgtgttatttgggcaaatggcgatcaatgtttttaacctgtatggggctttcatgtccacgacaacaacgctggagccatttctgaaattaaaagtcacgcccaaagtcagaatcatcatgatcctgggtgtcacgcttgtcggcacagtcttaagcctactgggacagagcaattttatggagctgtttttgaattttatctttttcatcagttatttcttaattccgtggacggcaatcaatttagtcgattactacttcgtccgccacggaaagtatcaagtcaaagccatgttcgacgtaaacgggccttatggaaaggtcaattggatcaccacaattgcgttcgtgctgtctatcttgctggaaattccgtttatcaatacaagcttttacatcggaccgcttgccaaaatgtttggcggcggagacatcgcatggattatcggcttggccgtgccttctgtgctttactatgcattaatgaaaccgcgtctgaaaaaacgggcggggtatcaagaaaagctgtcttctctctgaagacagcttttttatcattcaaatcgtttccacacgcggggcaggatgtcagatagctcatgagcgagcaacgtatgagcggagtgctcgtccgtccagagctcggcgcacgcaccatgcaaatagaccgcgtttaatatggcgtgctttggatcttcatggcagcagagcatccccaatatcatgcccgtcagcgtgtcaccggttccgcccttggcgagcgccccgtttccagttggattgagccagcagtctccatcaggaaacgcgatgacggtttggtttccttttaacacaatgacagtctgcagctgagccgcccattcctttgcatattccgctctttttttctgcaattcgttcacgggcacccctgtcattcgggaaaactcgcccgggtgcggcgtgaggatgacgggggcctcccgtttcggatatgtgcgcttcgccagcgctccggcatccaaaataacaggacaatcagccgtaagcacatgatcgactgcctgctgtacgctttccgtttgcggaaggcccggtccgatggcaatggcccggtacgtctcttcaagctgagcatccgccgcctttttccagccgtcacgccaataggtcgcctcgggcaaaacaggaacaattagcgggattacgctttctgatgtaccgatgacaagcttgccgagaccgctccgcatggccccaagccctgcaagcagcgctgctcccggcatgtcgtcacttccagccagcagcaaagccgtaccgtacgtgcctttatggctctccgcatctctttcaggaagcgtggcccttacatgctcttccgtccaaaatggaacattcatctctatccctcctctgctttcttttcctatttttcctgtcccttttctttttcaaacaaaaaagacagccttttagggctgtcttttattttacaggaacatcaaggtgatacaggcggcgatatcgttcgtttgccgccagcagctcctcatgggttccttccatttctgttttgccgttttcgagaaatacgattttatcggctgcttccactcccgcgagatggtgtgtaatccataaaatcgtttttcctttcagcacctcaaacaccgtttccatcaattcacgttcggtaataggatcgaggccgactgttggctcatcgaggatgatgatcggtgtatcctgcagcaaaatcctcgcaagtgcgatccgctggcgctctccaccggaaaaacggatgccggtttcttgtacagaggtatgatatccatcaggcaatgactcaatgtagtcatgcagcttgacctgctttgcggcgcggcgcacatcctcgtcgcttgcttctccgtttccgagcctgatgttgttcaaaatacttgtatcaaacaggtgcggtttttgatttaacacggccaccgcatccgcaatctgatcctttaacagcgctgtctccactccgtttaacgtcacagaaccggagtccggtttcaaggcgccttcgattaatgcaagcgatgttgatttcccagagccgcttcggccgagcagcgccattttttctccttggcgcagcgtaaaggaaaagttgtgcagcacttggctgctgttgtcataagaaaacgtcacatcacgaaaggccaaggtgacatcttgaagatcgagcatttgatcccctgattcagtttgtgacgcctccagctgaggagccaccttgttcatgcgtctgatagaatcctgatagcccggcacttcgcctaaggcatccgaaagcggcaaaaaggcttccgtcaacggaaataccactagcacaaaagcggcaatcatcgttttagcgagctcgccgtccgcttgctgtcccgctgtccaaaacagcatcatcaaaataaggccggcgacaaggcattgcgcaacaaagtcccgccatcttgtaaagcattgttttttccgttcaagctcaaaccaatcatgttcctctttttcataagcatcaataaaagcatgccggcgtccgctgaacatccagtcgctgacacccatcacagcatctgtcagacggctgtacagcgcattccgtccgcttttcagcttcgcattcttcgctctcgtcacgagcaaagacacaaccggaaacaatacaacaagaacaaacaaatacagcgcaagcaatatggcaaacggccaagagaagaagccgagcgctatcactgacacagcatacaggagcaaggctgagatcgcaggaaaaatcgtttttaagaatgcatcctgcaaatgctcaatatcctcagacaaaatgccgagcatatcccccgtgcgaaaacgggaacgcagcatcaaagcacccggctcaagcatattgtaaaggcggacgcgcatgtcggatacgattttcaaaatgatgtgatgcccgacaagccgttccacatatcgcgacacagaccgcgcaatcccaaaagtgcgcactgcgacaatcggcacataaatgagcagaatgttttccggccttgtcgccgctttagaaatcaaaaacccagaggtgaacatgagaaaagcagcagaaaaaatcgtcaccgcgcccaaaaagataaccagaacaaacaggcgggcattttgcttgatatacggcaaaatccattcttctttcttcatgctctttcccccagttgtgccttcacgagtttggtatacacaccgtttttctccagcagttcattgtgagtcccgatttccgcaatcctgcccccgtccagcacgataatttcgtccatatcgagcatccagtgaaggcggtgagtcgcgagaaagacgagcttatcctcaaataaatccagcatcgtttcttttatttcatattctgtttcgatatcaagatgggcggtcggctcatccagcagcaggatcggacggtttcccaaaaaggcgcgggccagcgcgacacgctgtgcctggccgccgctgagcgcccggccgccttccccgatccgcccctctaatccttgaggaaggctatccaccagctccgccagtccagctgccgcagcagcacgggctgtatcctctgccgaagcgcttggatggtagaagcgaatgttgttgccaagcgtatcatcaaaaatgtacggatgctgtggaatgtaaagaaggttcttctgccagctgccgtcctgcaaatgggaccggcttgtaccattaacctcaatcatcccgccatccggctctaaaaatccgccaagaatatcaattaatgttgattttccggcgccgcttgcaccgataataccgatttttttcttgcccttgaatgagagatgaatatcagacaccgaacggccgactgacacgcctgacagcttcagctcatcctgatcagaccaagcctcgagctgaagcggcgtctcttctttaaaaccaggctgcgacaaaatctcttgaatggtttttcctgcttcctggccgttcagcgttgcatgataatcattccccacttcccgcaccggcaaaaaatactcaggcgccagaataagcgccgttaaagcagggccaagcaaaatatcgccgtcaatgaggcgcaggcccagaaatactgcgactgtcgccaccgacagcatcgtgaaaaaatcgagggcgaatgatgacaaaaacgccacccggagtgtgctcatcgttgccttgcgataccgctcactcacatagaaaatatttttgctgtgtgacttgctcaaacctaggaaacgcaatgtctccagcccgcgaagagaatcaacaaaatgattggaaagtctctgataggatttccactgacgatccgcttttctctgcgcgacaaggccgaggagaatcataaagatgatcagaatcggcatagcagcgactaaaatgatggctgatgtccgatcctgaaaaaacacataaatgacaactgccgcaggcacaatcgccatgctgaccattttcggcagaaacagctccaggtagcggcggaactggctgatgcctcccatcgccagcgtcaccatttgccccgtcccctctttctttgcaaagcgggggcctaatcggaacagctgatcaagaaaacttttcctcaaatctgctcctgtccgggcggcgtattgatagacgattttctgtcgcgccaccgtcaccccgtgccgggcgataaaagcgatgaggaaaaagccgatcatcggaaaaagggaggtaatgcccttcccgttgaacagtccggttacggcctcactcagccactctgcctgcataataatggcggctgtctgaatcatcgttaaacaagtaatcaaggtgagaatccgcttcattcctttatatcgaaacaggtcttttcccattaataagtcataggctccttatggctgacgcgcttccggaagacataatagctccagatctggctgccgatgacgaacggcaatagcgttaatgctgcaattgacatgactttaagcgaataatctccggaagaagcgttagctactgttaaatcgtatgcgctatgaagcgagctgaccattacgcgagggaatagggaaataaagatcattcccacggtcagcgccagaccagcgcctgtcatcccaaatgtccagccgtcttttttcttacgaataaatacagccgcgagcataaagcagatgacaatcaaaacagcgagcggaatggtaatctcgccgcggcgtgtaaacatgtctgtctgatacgcagaaagggccgcgaaggcaagaaccgctacaaaaacaacacccattatcttttgcgccattttccgggcgcggttttgcaaatcaccaatcgtacgcagcgtgataaacattaatccatgctggaagcaaagaagcgttaccgtcacaccgccaagtatagaatatacattgatataatcagaaacatgtgcgtgaatgttcatgtcggcatcaatcggcatcccgcggaataatgtcgtgaacagcacaccaagcacaaacggaggaatcagactgccgaagaaaacgacccagtcccaaacctttacccattttaaatgatccaccttgccgcggaactcaaacgcgaccccgcggcccattaacgcaagcagcactatgacaaacggaatgtaataaccgctcagcatcgttgcataccagtttgggaatgccgcgaaaatggcgcctgcgccagtcaaaagccacacttcattcgcgtcccagaacggcccgatcgtgttgatcagcactctgcgttctaattcattatggccaagaaaacgggtcgccatgccgaccccgaaatcaaagccttccaaaaagaagaaacctacaaacaatacggcaacgagtataaaccaaagatcatgaagagatgccatggtatacctcctgactaaatggatctgttgatacaggaacatcatgatgatcactatgctccgcaccttttttaatctcacggataaacaagaagacaagcagtgcaccaagaatcaagtacatcacaccgaatgcgatgattgagaataacagggagcccgctgttacattaggcgacacggattgagcggttgtcattaaccccataaccgtccaaggctgacgtccgatttctgtcataatccagcccgcggagttcgcaagaaacgggaaggaaatcaacgcgatcatgatgcgcaaataccatttgctgttttcaagctttttgcggcggtttaaccaaaggccgcctaacgcagcaagaatcataacaacacctgctcctaccatgatgcggaagctccagaatgtcgttttcactggcggaatgtagtcgccttttccgtatattttttcgtactcagcctgaagggttttcatccctttgacacttccgctgaatttctgataagccaagtagctcaaggcataaggaactttgatttcatttgagcttttttcattttttgtatcgatcgtcgcaaaagcggtccaagcagcagggtcaccgctgtcttcccatagaccttcactggcagccattttcatcggctgtgattccatcaagtgctcagcctgcatgtgtccgctaaggccgacgccaagaccggcacaaagaccgacgatcattgcgagtttaaaagattgcttaaagaacggcacttcttttttcttcagcagtttaaaagcactcactccggcaataaagaaagctccagtggcaagcgcaccgaaaataacgtgcgggaattcaacccaaagctgagggtttgtaatcaacgcgccaaaatcattcatttccgcgcggccgtttttgatcgtaaaaccgaccggctcctgcataaaggagtttgctgttaaaatccagaaagatgacatgatcgttccgaatgatacgagccatatgcagagagcgtgaattttcttcggcaggcggtcccagccaaaaatccataatccgataaaaatagattccatgaaaaacgccaataatgcttcaatcgcaagcggagcgccaaatacatctccgacaaaacgggagtaatctgaccagttcagtccaaactggaattcttgcaaaatccccgttacaacaccgactgcgaaatttattaagaataagtgtccccaaaactttgccattttgagatacagttcatttttctttacaagataaagagtctccatcaacgcaaccataaacacaagcccgatagacatcggcacaaacaagaagtgaaacaacgttgttgatgcaaattgtatgcgggctaataccaattcactcatgctttctcctccatttccggttaaaactgttaatttgctcactacttcacaaatagaaccgagactttgatcagtaattcacaaaatagacgaaaaaaatattgttcaatatttcacaaatgtgtcaaaaagtcgtccaatatgagacaagattgccagactgaccaaatgacacaatctctgactggttcatattaagtactttacaacgattcatttcaaaaataaagcctaaaatacctaaaaagtcccgccctatgtgacggatttttgtctattttgttgcttatttatgtcggctgctaggataaatgaccctttattatcgtacatcaacacatcgttccttgcgaacaaaatgcttgccctgcaccagcactcgtttctcagcactccgtcataaacagattttaggcaggatgcctcttttcatttgaaccggcaagtggagaaaagttgaatagtaaatttttaatatattaataatttcaattttttagtatacttaacatagtgaacaatttcactgcatcaagaataggggaggtttttcaatgggagagcttcaaacacacatgcaattgcaaacggatacaattcacgaaggggttcgaaaagagaattggtttgcgaaagccatgaatataaaagtaggcatcataccgcttcctgtgtatgccttgctgtttatattaatcactgtttttgttatgcatcacgatgtaaaaagtgacattttgacatccattgccgtcatggcgtttttcgggtttacctttgcccaaatcggcaaatcgataccgattgttcgttctatcggcggcccggccatcctagctacttttattccgtccgctgtcgtgtactatcacctgctgcctaatgatatcgtcaaatccaccacagaatttacagaaaactcaaactttctatatttgtttatcgccggtattgtcgtcggaagcattctcggcatgaaaagagaaacactcgtaaaagcattcatgaaaatctttattccgcttattgtcggatctgtcacagccgctattgtcggactggctgtcgggacattgctcggactcggatttcagcataccctgctgtacattgtcattccgattatggctggaggagtcggagaaggcgctatcccgctgtccatcggatattctgacatcatgcccatttctcaaggggaagcgtttgcacttgttctgccatcgattatgctgggcagcttgtgcgcgattattctagcgggattgctgaaccgcatcggaaagaaaaaaccggaatggacaggcaacggcaaagtggaccgctccgaagaagagtcccctgcgctggaggaatctcaaagcggacaacaaatgttcaacctttctttatttgcgtcaggcggtatccttgctgtttctttatacttagtcggcatgctcgctcacgattttttcggttttccggcacccgttgccatgctgttactggctgttctaatcaagctgttcagattggtgcctgcctcaattgaaaatggcgcgtttggagtgtcccgctttttttcaacagctgtgacctacccgcttctctttgcgattggggtatccatgacgccgtgggacaagcttgtcgccgcttttaacctcagtaatattattacgattctgtctgtcgttgtgaccatgatggccgttggcttcttcactggaaaatggctgaacatgtatccgattgaaaccgccattatcaatgcgtgccattctggacaaggcggcacgggtgacgttgccattttaagcgccgctgaaaggcttgagttgatgccgttcgcccaggtatctacccgcatcgggggagcgatcacagtatccttaaccttattgctgctgcaccagttttattgatccccgcaagcaagttcttcgtcaaacgaaagagcttgcttttttgcatgtccatatttttgcaagttcccatcccatgctatagtaatagttggaaatactagatagaaaggaatctggcatgcctatgggaactcatctatttctctttatgcttctcgggctgggattttatttgatatcagccctagctgcaaaactcattccggccatagacttctggattgatattgttctatgggtcggcgctgcagtttacatcttctctcatctctcattcatggacggcattgtctcactcgcgacaatgttctactgctattggaccgcaatggatctcattgtttcagagcgtgtggaaaaaccttcgggagactggcaggaaatcgagctggccagaaacaaaacacgtctcctgtcagacattacgctgaccgccattgtgtttgcaggggctgttatttttttcatctatggacctgacccaagccctctcaaatatgtgatccttctcggcatgatctccggcggaggggcactggtgaagcgtatactgaatgttttcagcgtaaaggttttttattcagcagccttagaaaaattgcatatcagctcacactatgaaacccgtacatacccgctttccgatttgaaggacattcagcttgaatcaacagctgatctcttaaagctccatccgcttctgacgatgtattcatcacgtttagatttgacaacaagctttcagcaagtcattaaactgtctcttcccggcgaaacactgtttctgacggtgaaggaaccgcaaaaatggaaaacaattcttcaggaatacacagatgcaaaaaacaatgtggacaatgtgatttctgttttgccgttttatcatagaaaaaatgtgaagcggctgctcgggaagctttattttgccgccagcgtaaaaggggtatccgcttacgccttattggtgctcgcgttatacgcatcacacgcctctccatgggtcatggctgttgccgtaatcctatattgggtattcaacatgtatatgtcagaccgtgtgttgcgggcagcgatggacgccaagccttgtcatcatccgcatgtacaggcagcggccgatatgattttccgatcggccggcatttcccatgtccgcatatacgaaacggagagtgatgattacaacggaatggcagtaggcatgaatgtcgggaggtcaatggtcatcctgacaagcgccacactaacacttccacagcgtgtcatcgaaggcattctggcccatgaggcaattcatatcaaaaaacgtgacgttctgtcatcacagcttttgcgttttctatatcttggagctgtcgttgggattttcctcttgtttgagcagcatatcacccatcccgaggcccacaaaattgcgctttgggctttcattatggcaatcattatcctattccagctctatcaatccttttgttcacaatggatggaggtgcgtgctgacaaccttggcgcatccttgctggagggcggttacaaacaaatggctgaagccttgaaaatcttggcggttcagcaggatgaggacatacagaaacaaagtgcctacagctctgaagccggtgaagacgagcttcaaattgactctctcacccgtgataaaagctggtttttcagattgattgattttcagttcgctcctcatccccctatgtattggcgtgtcggcactttattgtcaaacaaaggacatggggtgctaaagcgctggctcagagaccgcctgaaagaatcgatcactttgaaatgaaaccggtcagcgtttcatccgtataacagatatggtgaaaaaagggagtgaccagaagtgatagtgatcttattgataatagctattattgtttttctttcagtcattcagccgcagccatcggataataaaatccgccagcaggcggacagcgggtatttcggttattcagatcatagctcgcaccatgatggattcggcagtgacggaggtttcagcgattccggctgtggcggcggagggggcggcgattaaacgccgcctttttttatttcattgattcgatgtacgcaccaaaagccgagcccgacatgcctggggacacgcgcacacgatggagggcatacattccctggtctctcgaagccgcgcccggttctgtcgtcacgcccatttgatagcctgttttttcagcggccttcagcgtctcctcattgtagcgccctaccggatagctgatgatggtggtttgctgatgaaacatgtggtcaaacagctttttcgaatccgccatctcactttgctgctgttgaggcgttaatccgttcagctcaaggtggtcaatcgtatggctttcaatcgatatgccgtgctgtgccatttccttcatttgttcctctgtcagatgatgcttatgtccgatcgatttgccgatcataaaaatcgttgccttcatcccgtactttttcagcaccggatacgcatcttgataattgtcggtgtacccgtcatcaaatgtgatcagcacgcacttctcactcggttttttatcctgcgtcagcatgagatatgcctctttcggcgttaatgtctgatagccgttatcatgaagccacttcatatgcgcctcgaattctttctttggcacacggaggctgtttcctgaagaaatgctgtggtacatcaaaatcggcagctttgccggtttctctgttttgatccatgcggatgtatcgtcttcttttttctgaacttgtactgcctttttttccggtttcttttgttccgcttttggcatcggctgctctgcattcgcctcttgatcagcgcaagccgcaagagccaaacagctgcccaaaagaaagatgcttaaaaacaatcgtttcatcgttctcctgctttctgtctatttcttcctcctttttcatcggtttgattctgagattttcaatagcaaaaaaccggacatgtctccatgtccggtttttttgatcctattgaattctcacttctgtctcactgtcaaagaaatggcctttattcatatcaaatgcaaccgtcagctcatcgcccgattgaatatcgaggcgggcgtcgatccgcgcaataaagtcttggttgtctatctgcgaataaatcataatttcagaaccgagcagctctgcaacattgattttcgccttaatcgaagagttcttatatgattccacgacaatcaattcatcatgtatatcctcaggacggatgccgaagatgacctctttgccgatgtagcctttttcacgcagcactttcatttttccttccgggacggttaatgccgcagaaccgattttgattaagccatccgtgagctttcctttgaaaaaattcatcgccggtgatccgataaacccgccgacaaagacgttttcagggaattcatatacatccttcggcgtcccgatctgctgaattttcccatctttcatgactacaatccgtgtcgccattgtcagcgcttctgtctggtcatgcgtcacataaatcgttgtagtctgcaatctctggtggagcttaatgatttccgcccgcatttgcaccctcagcttcgcgtccaggtttgacaaaggctcatccatcaggaacacctttgcatcccgcacgattgcccggcccagcgcaacccgctgtctctgtccgcctgacagcgctttcggtttacggtgcaaatattcctccagcccgagaattttagcagcttcctctactctttttttgatttcaggcttcggcattttccgaagcttgagcccgaacgcgatattatcgtagaccgtcatatgcggatagagcgcgtagttctgaaataccatcgcgatatccctgtcctttggcgctacatcattgacccgttttccttcaatataaaaatcgcctttcgaaatttcttcaagtcctgcgaccattcgcagcgtcgttgatttcccgcagccggacgggccgacgaatacgataaattccttatcggcaatatgaaggttaaagtcatcaaccgccggttccttctgatcataaaatttataaatgtgctccatccgcaattcagccatctaacatccccctttgttattgtaaacgctttcttatattgagtgtaacagcaattccctctcgctaaaatgggcagcgttcataaaatcatccagccatttttcgtgcatatttccaatttattctgaactttcattttgcaggcagataaaataggcaagaagcgcgcctttgtacgatttgatatctatccctgaccgctcaataaatttatcaatccgatattgcaggctgttgcgatgcagatgcagctttttcgctgttaatgtgacgtttgagttgttttcaataaacagcttaatggtcttccttagctcagcttcacttccaaataaaagctcagcttcttcagagagcagcgtttccagtttttctttttctgtttctaataatagaaaaggaaagatcatctcaaaggtcacactctgcacctgaggcagccgtttttcagcaaacaggaaatacgcctgttcacgagtgtaatgttttcgcagacactcatccggctcgtaaaatcttccggcgtaaaaacggacactgaagtagaaatcactttcaagaacttttgcgagcgattccagttcgcccttcttcgccgccgcttcactttcctgctcgacaatcacgcctctgtcctcatgaatccacacaatcacaaaagacaccggccaaaaatggcgaaccgcttctgtaaaggacgtcctttctattttgccgaataaatgaaagtgaacaaatctcgtccgtttctttatgtacgccggcaattcccctctggaaaaaaggaacgaaaaccacttgttttcctcaggtgatttcatagacagttgattgccctcatccgcaggcgtcaaaaatgattgcagcaccaatacttctttttcactgatctctgttttcggaatggagatatacctctgattgctctcatcaaaaaaacatagacagccttcccttatgcaaagctcctcagacacaatcgaaccgggataaatagccagcagcgatttcatagagtctcctctcttatgtaaggatctgtatattcagtataaggcgaaacacacatgttctccactaaaaaagagtatatccggtatagatagacgagaaactgaaagggaaacctcattcgtttacatattggcttcagcggaaatagaagaggatatgcaggaccaaaggagggccatcttatgagtttcgaaacgttaaacaaaagttttatcaatggaaaatggactgagggagaaagcggacgtacggaggacattttgaatccgtatgaccagtctgtgatcacaacagcatctttggcaacgggcaaacagctggaggatgcgtttggcattgcacagaaagcccaaaaagagtgggccaagagcacgacggaagaccgaaaagccgtcctgcaaaaagcgcgcggctatttacaggaaaaccgtgaagacatcattatgatgatcgcccgcgaaactggcggaacgatcattaaatcaacaatcgagctggaacaaacgattgcgattttagatgaagccatgacgtatactggtgaattaggcggcgtcaaagaggtgccatccgacattgaagggaaaaccaataagatttaccgccttccgctaggtgtcatttcatcgatttctccatttaatttcccaatgaatctatccatgagatccattgcgcccgcaattgcgctgggtaacagtgttgttcacaagcctgatatccaaactgctatttccggcgggaccatcattgcgaaagcgtttgaacacgccggtcttcctgccggtgtccttaacgtcatgctgacggatgtaagggaaatcggggacggcatgctcaccaatccaatcccgagattaatcagctttacagggtcaacagcagtcgggcgccacatcggtgaaatcgccgggcgtgccttcaaacgaatggcacttgagctcggcggcaacaatccatttgccgttctttcagatgcggatgtcgatcgtgctgtggatgccgcgattttcggaaaatttattcaccagggacaaatctgtatgattatcaacaggatcatcgttcatcaagatgtatacgatgagtttgtagaaaaattcaccgcccgtgtcaaacagcttccgtacggcgatcaaaccgatccgaaaaccgttgtcggcccgctgattaacgagcgccaaatcgagaaagcgctggagatcattgagcaggcaaagacagacggcattgagcttgcggttgaaggaaaacgcgtcggaaacgtgctgacgccgtacgtctttgtcggtgcggacaacaacagcaaaattgcccaaacggagctgtttgccccaatcgcaaccattattaaagctggcagcgaccaggaagcgattgacatggcaaatgatactgaatacggcctcagctctgcggttttcacttctgatttagaaaaaggcgaaaagttcgccctgcaaattgacagcggcatgacccatgtcaacgaccagtccgtcaatgattcgccgaatattgcctttggcggaaacaaagcaagcggtgtcggccgtttcggcaatccgtgggtcgtcgaggaatttaccgtgacgaaatggatttcgatacagaagcaataccgcaaatatccgttctaaatgaaaaaatccctctgtttcaagtacagagggatttttctttatttagatatatccacaaacccttcgccaaacacatcgcgtacgtcatgaacgatcacaaacgcttttttgtcgcagcttctaatgatttttttcagcatagacagctcctgtttgttaatgacgatatacaaaatctcttttgattggcccgtataatttcccttccctgataaaatcgtcacgccccgatccatcaaggtattcacctgctctgcaatctcactcttattttctgaaatgaccgtaatggcttttttcgtattcaaaccttcaataatgaagtccatcactttggtaccgatatacagcatcacgatcgtaaacatcattttttctgcaccaataataaaataagagctaaatactacgattaaatcaaaaaacaagagtgcatagctgatattccagtctaaatatttattagcaattctggccagaatcgcggaaccagccgtcgtcccgccgacccggataatcatgccgatcccgactccggcaaatacacctgcgaaaatcgtattaatgatcaattcatcagacggaatgctccacccatgtgtcagatgaagaaaaagcgaatttgccgcaaccgcaatgatcgtataaaccgttgtttttccatccagaaacttgtagccgattaaaagcaaaaacgcatttaagataaagttcgtgacaccaggagaccattgaaacagataatacaatatcagcgtaatcccagtgactccgccttccccaagatcattgggaatcgcaaataaattaaccgcaagcgcgaagaaaaaagcgccaatcacaagcataagtacatccagcattctctttttcatcacgaaaacactccttctcattgttctgttctactagcaaataaaaaaacccaggagaacgctctcgaaaaagagcagaaactcctgggcttttatcccaccgtgtcataacagccaatctgctatgtgttttctctcggtcacagtccaatttgcattgcggaaccctagaaaaccactgtttttatcatatccttttcactttccaatattagcattataagggacggttcgaattggttcaaggggtatttgcggagttttcatcagataagctggaagaaaaaacgatttatctattaaaaaagaacagatataaccgataagaaaaaaagcatatattttacaagtaaatgtaactataaatgataataattatgagaaattcataattttatattgactaagtgaaataatataggcattatagtacatatgtttcgtacattttattacataggaggaaatataatggcaggaaaactagtaccctgtaaagcttgcggtcaagaaattgcaaagggtgtaaaaaaatgtcctaactgcggtaaggatcaacgtaacttttttatgcgacataaaatcattacgtttattctcgcagttgttgtcatcattattatcggtaatatgattggcggcggaggcggttcagaagccacttccaaaacatcaagcggaagcaaagcagaaactgaaaaaacatacaatatcggtgatactgtaaaaactgaaaaaactgaagtgacagttacgaaggtagaggacagagatactgtcggtactcaatatgttgaaaagaaagcatctgatggtggtacaattgtagctgttcaatatacaattaaaaacgtatctaaaaagccaataagttctttttcaattccaactgttaaattagttgatgctgatggtacttcttatgattctgatattgatgcttctgtaaactatgcaactgagacaaaagttgataactctaaaattttgagtgatctaaatcctaatattaaagtaacaggtgtaaaagcatttgaagttgacaaggaagcttatgcaaaaggcacttggaaactaaaattcagtaatgatgttattgtgaaaatcaaataacagctaacaagggtgcctgttcaggcacccttgttctttaaaggccttctctattgagaaggcctccattcttattccgcactcttatacccattcacattagaagactgccatctccaggaatcagcacacatttcctcaaggccgcgtttcgcttcccagcccagttcccgcttggctttcgcaggatctgcaaagcatgtggcgatgtctcccgggcgacggtccgcaaaacggtacggaacctctttccctgacactttttcaaaggctttgaccatttcaagcacgctgtagcctgtgcctgttccaaggttgtatgcatcggctcctgtagagttcaatactttttccagcgccttgacgtggccttctgcgagatcaacgacgtgaatataatcgcgtacgcctgtcccgtcttttgtcggatagtcatttccgaatacgcttaattgctcaagcttcccgactgctacctgtgccacatacggcataaggttattagggattccgttcgggtcttcaccgatccgtccgcttggatgcgcgccgaacgggttaaagtaacgaagcagcgcaacgctccactcattgtcggctgtatgcaaatcacgcaatatttgttcaagcatgagcttcgtctgcccataagggtttgtcgcacctaatggaaagtcttccgtaatcggcgatgtttccggaacgccgtacactgtcgcagatgaactgaatacgattttcttgacgccgaatttctccatggcctcgcataaaataaacgttcctgtcagattgttatgataatatttgagcggaatcgccacagattcaccaactgcttttaacccagcaaaatgaatcacagcttcgatttcattttcagcaaaaaccgcatctaccgcttcccggtccaataagtccgcttcgtagaacgttaaatcttttcccgtaatccccttgacacggttcagcgcctcagccgaactgttggacagattatcaagaacaacaatctcgtagccgctgttcaataattcaacacatgtgtggctgccaatgtacccggcaccgccagtaacaagtattgccatgatgtaaccctcctaaaaaatgacctgttttcattatatagtgtttaaaaccggtccacatccatttttaagaagtttaatcgtttattaatagttttttcatatattatcagcattttcatacctttatgcagcgtgaacaagtatagcagctgaaaaatcaatctgccggttgacgtttttctttccctttttcgctatgcttaatgtagaaaggatttgatgacatggcgatgagcccatatatttttattgtattgattcttattattttatcgatgtaccgagagagagctgtcagacccgggaagttgctgatcattccgctgctgctcttatggggcgtatcagcatcgtttcagccggcgtattttcattccgtattacatgtggcgatcagcggcattttattattaatcgggctggcctgcgggtttggcattggaaagatggtaaacgtgcggattcacccggaaaccggaaaggtcacttcacgcggctcacttgggagtgttatcctcattctagtgatactttctttgcgcatggccgcgagaacatggctgcctgagagcaacgagatgtttattgccattattcattctatgttcttcattcccctcggcaccattacagcccgtaacattatgctttataaagcatacagacggctgaccgctggcaaggtatccattcaataactgaaagaaggaccagcatgaacagacaaactccggctcggcactactacaagaagcttgtgccgagccttattctcattttgaattgcatacaatttttatctcacccagccaaagctgatcccattttgttggcatttgtatttgcggtgtacttagcattcatttgggtcattccctatgtggcatccactgctgttagtttgtgcatattcatcggactctggctcctgaccgatttcttttgggctgtttccggccaagagcagggtgccgcctattttttgattgtatttttaatgatatatgccgcctttagactcccttcacggctatccttgatcttcacagcatgtttaattggaggcaacatattactcctatcctcacaagggggaagcttgaataccatcatcagcaacatctcgatcatgctcgggctgtacgtcctcttctcctccatgcgtttcagacgagaagcgagaagggaggctgaacggaatcatgctgaattggcaaaaatgcatgtgcagctggagcatgctcataaagaactccagaaagcgcatgcagagctgcaggaggcttctgttctttcattaaggtacgcggtccttgaggaacgtacaagaattgcccgcgacattcatgacagcatcggtcacgagctgacttctgttattgttcagcttcaatcccttccctatatccttaaaagcagcaaggaggattcagaaaaagtcattcaaaatgtactgagtgtcgccagggaatgtcttcaagaagtacggtctgtcgttcaccaaatgggccgtagtgaatcgatggtggggcttaccgctttgcgggggctcattcatcaagtggaggaacggagcggcttgcacgtttctttagatactgccggactatcagaagagtcttggcctccaaacgtgagcgaaacgatctaccgcatcttgcaggaagcgctgaccaatatcattcgtcacgctgacgcttctcatgcggcggccgtcatttctaacgacaagtcccatctctatatcacaatcaccgacgacggacaattcaccggcagccttacttatggatttggcctgacaggaatgaaagagcgcgcagaaaaagcaggcggttcccttactttcagtgccgtacagccgagcggcctgaaaattgagctgtcattgccgctcatgacaacgaataaggagcaaaaagatgaacaaagataacatacgcgtcgcgcttgccgatgatcagccgcttgtgcgtgaaggcttccgctacgtcatcaacgcacagacggatatgacggtttctggcgaggccggcgacggtcacgatattatagcactcgcaaaacaaacaaaacccgatgtcatcctcatggatgtccagatgccgcgttgctcaggcatcgaagcagcgaaagacattatgtccgcacttccagatacaaagatagtcattttaaccacctttgacacggaagaatacgtatttgaaggcatccgtgcgggagcagtaggctatctgctgaaggatacacttcctgaagagttgatagatgcgattcgcgctgcggccagaggcgaggcgattttccgtacagtcacagctgctaaaattatcagtgagacatttcaggcgaagcaacagccccatccagaagaactggcagagccgttcaccaaaagagagcttgaggttcttcagcaaatggcctacggactgagaaatgaggatattgctgaaaagcttttcgtcagtgaaagcactgtgaaaacccacgtgcaccgcatcctgcaaaaatgcaatgcccaagaccggacacaggcagtcgtttttgccattcgaaacggtattgtgcaatagaaatctctcatcccgccatgctaaaataagacaaaggagatgattggaaatgaaagaagaaatcattgaacggtttactacatatgtaaaagtcgacacacagtccgatgaatccgttgacacttgtccttccacacccggccaattgacattaggaaacatgctcgttgatgaattgaagtccatcggcatgcaggatgcagccattgatgaaaacggctatgtcatggcaactcttccctccaatactgaaaaagacgtgccgacaatcggctttctcgctcacgtcgacaccgctacagactttaccggcaaaaacgtgaatccgcaaatcatcgaaagctatgatggaaaagacatcgttctcaacaaacagctgcaggtcaccctgtcacctgatcaattccctgagctgtctggctataagggccatacactcatcaccacagacggcactacccttctcggcgcagacaataaggccggtatcgctgaaatcatgacagccatggattacctcatcaaacaccctgaaatcaagcacggcccgatcagagtcgcctttacgcctgatgaagaaatcggaagagggccgcacaaatttgatgtgaaacggttcaatgcttcctttgcctacacggttgacggcgggccgctcggcgagcttgaatacgaaagcttcaatgccgctgccgcaaaaattacgattaaaggcaacaacgtacatcccggcacggcaaaagggaaaatgatcaactctgcgaaaatcgcgatgaagctgaacagcctgctgccggcagacgaagcgcctgaatatacggaaggctatgaaggcttctaccacctgctgtcgattcaaggagacgtagaggaaacaaagctccactacattattagagactttgacaaagagaatttccaaaacagaaaagaaacaatgaagcgtgtcgttgaagtacttcaaaacgaatacggacaagacaggattctgctggatatgaacgaccaatactacaacatgagagagaaaattgaacctgtcatcgaaatcgtcaacattgccaagcaagcgatggaaaacctcggcatcgaaccgaagatttctcccatccgcggcggcaccgacggatcgcagctgtcctatatggggcttccgacgccaaacatctttacaggcggggaaaatttccacggcaaatttgaatacatctcagttgacaacatggtcaaagccgtaaatgttatcgttgagattgcaaagcagtttgaagcgcaagcctaatgccaaaaaaccagtccaaaaaaggactggcttttttgtgtgaaagtgaaacattttaaacgcgtcctccgtaaaacaagtattaacaaatgaggaggaaaaacaatgacaaaacatgcaatcgctgcaaagagtctcttgaaaaaatggatcatttccaggccgcttaacatgcaaaagaaatccagcccatttcaaaaaatcagaaaaatgttcaaacgcttcttcaaataaaacattcaaatcccctaaatacaatccgtattcacccgtaccgcccaaatgctccgtaatttgggttttttgtgttcaattccgcaaaatagggtataaaccaaacaagcaagaaaacagcacccaaaaacaggtaattcgaattacgtaaacttaggttaaaagttatataaaggaatttattttatcgtcgatagtaactatagaaccaatcatcaacgagagcaaacagcgtaattcaagactattttcaggtcatcaggtaatactgttttagagggacagtttcttgttatttattgatttagaattttttgaatactttttggcattttatccgtacaatagagagtaccaaaactttttttgggaggtatgtaatatgatcctatttattatcatcgcattatgcggctatcttcttttttctttcagcaaggacaatcgccgcaaaccgcaaaagacaagccctctgccagcagccgcacctcatcacaacaacctaatcgaccttgacgccatccgccaaaaacgccggatgcatctttcctaattctatatttcaaacgaaaaggctgctgaatcacgcagccttttaaaattgttttgatttagagcctgaaaccttttcgccacatatccgtaatttcatacaaggcaaacccaaaggagacttcagcaatgatcgagttatttatgaaacaaaaaatgttctcatttaaagatgcatttcacatttatgaccgggatgaacaagaaacattcaaggtggaggggcgttttttctcgttaggagactcattacaaatgacagactcatctgggaaaacgctcgtttccatagaacaaaaactaatgtctttattgccgcgctatgagatttcaattggcgggaaaacagtttgtgaggtaacgaagaaatgtaacgtttttcaaaccgaaatttgtgatttccgggcttaactgggaaatcgatggtgatttatggagggatgaattccagctgacggacggggaaaatgtccggatgtcagtgagcaaaaagtggctcagttggggtgattcctatcacttgcagattgcaaacgaggaagatgttctgatttgcactgccatcgctatcgtgcttgatatggttttatataacgatgaagatgaaggtattttctaaaaagcattgacaattgatccaaaagtaataatattaagataattgaaatctgaatatgaagttataccttatcaagagaggtggagggactggccctatgatacccggcaaccgctgtttcaaacagaatggtgctaaatccttaagaacattgtgttcttgcagatgaggcggagatttgatcgttcaagctcttccttacacaaaggaagagctttttacatgctcaatatttcagaaaagaggcgaataacatggctcaacaaacgaatgttgcaggacaaaaaacagaaaaacaacgcaaagcacctttccgcgccgatcatgtcggcagcttgcttcgttccgttccggtaaaggaatcccggcaaaaaaaagcggcaggtgagatgacagcggaacagcttcgtgatatcgaaaatcaagagatcacccgcatcgtggaaaaacaaaaagaaatcggtctcgatgtggtaacagacggggaattccggcgttcctggtggcattatgacttcctggaagggcttgacggtgtggaaccgttcattccggctgaggggattcagttccataacacaaaaacgaaagcgcgcagcatcaaagtgacgggaaaactcgattttacgagccacccagcgcttgctgattatcaatttttacatgagattgccggtaacgcgacgccaaaattgaccattcccagcccaaatatgctgttttttggcgaaaaggcggataaagggatttatgacgatcaagaggaatactttcatgatctggcccaagcgtacaaaaaagcaatcaaagccttctatgatgctggctgccgttatctccagctcgatgatacgtcatggtctctcttctttgaggaaaaaggcagagaggttgtccgggcgctcggcggcgatccagaaacattgccagccatatttgccaaaacaattaacgatgccgtcgcagaccggcctgacgatttaacgatcacaatgcacatttgccgcggcaacttccgctcaacctgggcggcatcaggagggtacgacgctgtagcggaaacgattttggacggcttaaaccttgacggccttttcttggaatacgatgatgaccgctccggaaactttgatccgctccgttttgtgaagcgcaaggatctgcaaattgtgctcggcttgatcacatcgaaatacggcgagcttgaaaatcctgaggatgtgaaacgccgtatcaatgaagccgcgcgttttgtcagcttggaccagctatgcctgagcccgcagtgcggtttcgcctctacagaagaaggcaaccttctgacagaggagcagcaatgggcaaagcttcgccatgtcatcgacattgccaacgatgtgtggagataatctatcattgacagaaatagaaaatgtgtgaataatagatactatcagaaaatttcataaaaaggttttccttatcaagagaggtggagggactggccctgcgatacccggcaaccgctgtttaacagaatggtgctaaatcctttagagcaatgattgctcttgaagataaggttgagattgtcacgcaagctcttccttatccaaaggaagagcttttttacatttgaatggaaagaaggaatggacaacatgtcacaacaaacaacacccgcagaacaaaaatcacttcaaagaaaaaaaccgccgtttcgcgcggatcaagtcggaagcctgttgagatctgagcccgttaaaaaagcgcggctgcaaaaagcggccggcgatattacggctgagcagcttcgccagatcgaaaacgatgaaattatccgcattgtggaaaaacagaaggaaaccggcctgaacgtcgtgacagacggtgaattccgcagagcatggtggcactttgatttcctggaaaacttagatggcgttgagccgtttactcctgagcaaggcattcaattccataacgtacagacaaaagcacgcggcattaaagtcacaggtgatatcgacttttcaactcacccaatgcttgaagattactcatttctccatagcattgccggtgacgcgacgccaaagatgacgattccaagcccgaatatgctgtttttccgcggaaaattggaaaaaggtgcatacaaaaacgactatcaccttttccagcatgatgtatccaaagcatataaaaaagcgattcaagcgttttatgacagaggctgccgctacctccagcttgatgatacagcgtgggccgttttcttatctgaaaaaggcttaaaacaaatcgaagcgttcggaacaacgcctgacgagcttcgccagctgtttgcgaaatcgattaacgacgcgattgcagaccgcccggatgacttgacggtaaccatgcatatttgccgcggcaacttccagtccacttggacagcggaaggcggctatgacgcagcagccgaaaccatttttgacggcttgaatcttgacggacttttcttagagtatgatgattcacgctcaggcggatttgagccgctccgttacgtaaaacggtctgatcttcagcttgttcttggcttagtgacatctaaattcggtgagcttgaaaatccggatgacgtgaaacgccgtatcgaagaagcgtcccgttatgtaagcttagaccagctttgcctcagccctcaatgcggatttgcttcaactgaggaaggcaacaagctgactgaagaacagcaatgggcgaagctccgccatgtggttgagatcgctaatgatgtttggaaataagaaaagaaaaaacacacttgattccctagcggagcaagtgtgttttttatgtcattgtgcggtgtagcccccatcaaggacgacagcctgcccagtgacgcccttcgccttctcgcttgccaaaaacacggcataatccgcaatttccttgacggaaagcagtcgcttttgcggcacaagcggaaaaatgacttgttcaagtacagagtcgtaagggacatttctagttttcgatagatcgctaagctgattgcgtacaagctgggtatcgacataacccggacagagcgcattgactgttatgccgtggggcgcgccttccagcgcccctacttttgtgagtccaatgacgccgtgcttggcgctattataagcggatttccctgcaaagccgactaatccattaacagacgcgatattaatgattctgccaaactgctgttttttcatgatcggaaaaacatgcttcattgcaataaagggggccgtcagcatgaccttgatcagctgttcaaaggtgtctgtcggaaactcttcaatcggagcgacgtgctgaataccggcattgttcaccagaatatccaagcggccgtattgtttttggatgacgttcaccgtatcagcaacttgcgcttcctttgtcacatcatacggaatggccgccgcgtcaaagccttcttctgcaagcttggaggctgctttttcacatgcttccggacggaggtctgaaacgatgacgctggcaccttcccgggcgaattctcttgcgatttcgaatccgattccgccggcagcccctgtcaccaaagcgacttgttttctcatgtcaaacaccttcccattaagaattgagtacagactggcttacagcgaaatcagcttctgttttttcataaacctcttcaattgtgacaccatcctgaagctccgtcagtgtcatgcggccgttcacaaaatcaaatacagccaaatccgtaatcagcctgtgtacgactttctggcctgtcagcggatgagagcatgtttttttcacctttgattcaccatgcttattgacgtgctccatgatgacaacgattcgtttcgccccgttgacgagatccatggcgccgcccatcccttttaccattttgccggggatcatccaattggccaaatcaccctgctccgaaacctccattccgccaagaatagccaaatcgatatgcccgcctcttatcatcgcgaatgactcagcgctgtcaaaataagaggcgcccgtcacttcagtgatcgtttcctttcccgcattgatcaaatccgcgtcttccgttccttccagaggataggggccaattccgagcaagccgttttccgactgaagcatgacgtgaacgccatcgggtatctcatttgcgacaagcgtcggcattccaatcccgagattcacattcatgccgtccttgatttcttgtacagcccgtttgaccattcgttttctcgcttccttcacttggcctcaccctttcccgatgcttgctgaactgttcgtttttcaatccgtttttcttggctcgcgccaagcacgacatgctgtacgtaaattcccggcgtatggatatgatctggatcgagctctcctgcttccacgatttcttccgcctcggcaatcgtgatcttgcctgccatggcggcaatgggattgaaatttctcgccgttttcctaaaaaccaaattgcccatggtgtccgctttccacgctttgacgatcgccacatcgccggtaatgcctcgctccagcacataagtccggccgccgaatgttttatgttcttttccctcggctatggaggtgccgacgcctgtcgccgtataaaatcccggtatgcctgcaccgcctgcacgaattctctcagcgagcgttccttggggaacaagctcgacctcaagctctccgcttaaaaactgccgctcaaaaattttattttcaccgacataggaagcgatcattttcttgatttgcttgttagccagaagcaaaccaagcccccagtcatcgactccgcagttattgctgacaacggttaaatcctttactccctgatctcttatagacaaaatgagctgttcagggatgccgcacagcccaaaccctcccgcgatcagcgtatccccatcatgaatcagtttcgcagcttccttgcttgatgacagcactttttccatattgatgcccctttcgttttcttctacactagaccagtcaggctgtaaatcgcgatcacagcaaatacggcagccgttttaatgagcgtgatcgcaaaaatatcgcgataggattgccggtgggtcaaacccgtcacggccagaagcgtaataacggcgccattatgcggcagtgtatccatcccgcctgatgccattgaaatgacccgatgcatcacctctggcggaatattgtaagcctgaatcgcctgtaagtattgttctgacatcgcgcttaacgcaatgcccattcctcctgaagccgagccggtgattcccgccagcgcagttgtcgtaacggcgccatttacaagcggatcggtaaaagtatgtgaaattccgctgctcagcttatgaaaccccggcagtgcggcgataatgccgccgaacccgtactcggcacccgtattcatagatgccagcaaggcgccgccaattccttcattcagcccttccttcaattgggcaaacacacttctccaatcaaataaaatcgttgtgatgatgccaatcactaaagcaatctccaccgaccaaatagcagctgctgaagaaatatcaagcctgccgaactcctttaatcctatggaagaaaaatcaaatccattcggataccactttggcaggtaaatggtaaaatatttattcactgcaccgacgagaataagcgggacaaaggcaagcgcgtgccgaatcgggcttttgtccggttcagccgcggactcaatcgattcaggagcaggagcattctgcgaatcaaaaccgccatagccttcgccagatgcctgcgcttttttccgccttgattccaaatagagcatcccagctgccagcacaatcactgcgcccatcaagcccagccaaggggcggcataaatgtctgttttgaaaaacgacgtcggaatgacattttggatttgcggcgttcccggaagtgcgtccatcgtaaacgtaaaagcccctaaagcaatcgttcccgggatgaggcgttttggtatgtttgcttcttggaacatgtttttcgcaaaaggatatacggcaaatacgacaacaaacaggctgacaccgctgtacgtcaagacagcacccatcagcacaatggcaagtatcgctctttttgccccgacaagccggacaattgttttcgcgattgatgccgcaagcccggccatttcaacgacctttccaaaaatggcaccgagcaaaaacactgggaaatacagcttaataaaacccgccatcttctccataaaaattgatgaaaaaaaaggaagcacatggcttggatctgtcaggagcaccgcgaataacgcgcaaatcggcgcaaacaatatgacagaaaatccccgatacgccgtaaacatcagcaaacctaacgccaatagaatgatgatcagttccacacacacatcccccgtttccgcgaactagaaagcgtttacaaaaacctgtccgcatcggctgtttccgtcccctttccatatgtacgagaagcgtgggccaactattccgattaaaaaaggaaagctccttttttcggagctttcctctgccattcatttcattcctattaggatatcaacatcaaccgtaatatcggctgttttcatctctttcaggaggctgactcgatctttcggcgccgaccaggcaagcggcgtcatcttgagaagccagtggatcgcctgctggtcaagcgttttaacatagcgcagcctgacaggacggctgtgtgcagcatttgctgcaaaacgctcaacagctgccgcattggaatacgtgcgccttggtgaatcagtatataaaaattgccttaattctattaaatagtcgcttcgcggcactacttttacgagcatgccatcattcttcagcagtctatgaaactctgcataattggacggcgaaaaaatagacagaacaacatcaaattggcgatcatgaaaaggagcacgcgccacatcggcaaccgcccacatctgatctttgaatgccttagaagcttttaagatcccatccttcgaaagatctatgccggttcctatcgctgctttccctgcataatcaaacccgcaaagcgcattcaaatgagaaccctcaccgcaaccgctgtccaggatggtgaatgcctcatgaccagatgtgggatgactgatgagttctgcaatcgcatcatggagcgggtcaaaaaaaccacattctccaatcagcctgctcctcgcttcaaaaagctcggcaccgtaactggttttgaccggcttcgtcagaaagttcacgtagccgtgccgagatagatcaaatgtatgtcctcgttctgtacaaatcaagcttttccctgatgccgcatccatagaagaatcgcagagcgggcatcgaaacatgctgaaatcaactgttcgcttcatgataaaaaacaccccattcattcatttttagataaatgaaaaaggcatagacaaataaacctaggcctatctcaaaaattggccaggtctggcagtttgtctacacctgtcattatctataacgaatgaattggataatcatgaaaaaactccctttctgctgtatgggtttccccatttccattatacaacaaatctccaggatctggaaccttatagtgaagaaaaatcagtactgacatgctggtatcccgccaacatcatatcagcatagcaatccagcatgtttttcctttattttctcattttagaatataaattttattattgtgaaaatagttaaaaaggttgattttcaaaaagtgaaaggataaaatactgctatcatcttagaaaaagacattcttgtatatgatcagtaatatggtctgattgtttctacctagtaaccgtaaaaaactagactacaagaaagtttgaataaatttgaacgagttgaaaaggacaagttcttttctgtttgctcttatttttcacactttctgcacttccagaatttgtgaagaataagagctttttttgtttccataataaccctcataggagttgctatcatgtactttttactaaaccttgtcggtctcattgtgattatggcagttgtattcctatgttctccgcagaaaaagaaaatcaagtggcgcccgatcatgacgttaattgttctggaattgctgattacttggtttatgctgggaacaaaagtcggaagctgggccatcggtaaaatcggtgatttcttcacttggctgattgcttgcgctagtgacggtatcgcgtttgcctttccgtcagtaatggcgaatgaaacagtagactttttctttagtgcgcttcttccaattatctttatcgtcacattctttgatattttaacgtatttcggcattttgccttggctgattgataaaatcggatgggtgatttcaaaggcttcccgcttgccgaaattagaaagctttttctctattcaaatgatgttcctgggaaataccgaagcacttgcggttatccgccagcagctaacggttttaagcaacaaccgcctgctcacattcggcttaatgagcatgagcagcatcagcggctccattatcggatcttatctttcaatggtgcctgcgacatacgtgtttacagccattcctttgaactgcttaaacgcgctgattatcgcaaacctgctgaatcctgttcacgtgccggaggatgaagatatcatctatacaccgcctaaagaagagaagaaagactttttctctacgatttctaacagtatgcttgtcggcatgaacatggttatcgttattttggcaatggtgatcggatatgtcgcattaacgtcagcagttaatggcattcttggcgttttcgtacatggcctgaccatccagacaatttttgcttatctgttcagtccgttcgcattcctgcttggactgccagtgcacgatgcgatgtatgttgctcagctgatgggcatgaaattagcaacgaacgagtttgttgcgatgcttgacttgaaaaacaatctcaaatcccttccgcctcacaccgttgcggtggcgacgacattcctgacgtcctttgcaaacttcagtactgtcggcatgatttacggcacgtacaattcgatccttgacggagaaaagtcaacggtcatcgggagaaacgtgtggaaactgctcgtcagcggaattgcggtatctttattaagtgctgcgattgtcggcctgtttgtgtggtagaaacattgagccatatcccttttcggatatggctcttttcattattgataaatagaggctggcacctgcacatcccggattcccgctgcataaggccccaagtcatactggccgaagacgatggcgatcccgtttgccgtaaagtaaaacattgtgtctctgtttagggttatatcctctttctttacatcagggaaaaacagctcatcgtgttttttgatatagctatataggtaatctctcgttttgctgacttttgttttggtgttcagaatctgatccagcgtcacccgcttttgtgctttcaagtcatagttgaaggactggacagacgttaaaccgtgggcgccccctgaatagatataattgagtgtttgaatgctgagcttgcctgccgcattgtatttgacgctaaaggatgtttgatattccgttttaaagccctgctgttcgcctgcttttttgtttttcaggtattcctgatacgattgttcaatgtaggctttcagctcttgattgattttcttttcaaacgcggcattcccgatgtgatgcacttgtggatacgttaactccttgatctttttgtacgtatgagtgctgacagtcggtgttttcgtttgaactgcgtttagagatggggccgcatatgcaactacggaaaaaagcaagactgcaatccccgcggctttcatcattttattccatttcatacaatctcctcctttgatgtcgttgtttatcattcccttatttaagcaatacacacttttatagactgattaaatcgaaagaagtttctaggtctaacagcatgatttttccaataaaaaaagagacacaggatgtctctttttttactgtttgcgcccaaaaatcgcttcatgaacggcctgtgccaaatctgtatttccgaacatctctaataccgcaatgacagtctggtccggaatgtgctctgcttcgtgttttggcacgaccagatcgtccatggtttttttcaagctttcattcagcttttgctgcggatacgctttggtgtacatctccaccggatcaagatcatggttcacgcaccattgggcaaacaccaaaatcatcatattttcatcgcgttcgtaagcttcagcgagctgtttttcgttcatttgtcatgctccttatgaaaagtatcttccttaaagatacaggagccgatcaaattcgtctatcccaatggcgatgagcagaaaccgcatcgataaatgccttgctgaaagcggtgtagtcaggttcatctttagccgttacgatgcctggcccctctgttgtcccgacagaggattgaagaaggtcaattccttcatttgccgcaccgatcgccttgtagtgattgtaagcttctctgataaactccatcgcttgtttgttgtcttttaactccggccctcctgcggcatagacggcatcatacagaacagaatcaaccgtcaggaacgtgccgctggcctcaagctgctgtccgctgccgcttgtcatataccccagattttgactgatgatatctactgtgattccttcttgctttaaggcttccagcactgtttgcagctctttttcatgaaatccgtttccggtgagtacagcgacttttcttgttgacgcggttttcactgtacgggcttggcttaacgcaggcgaagtaagaatttctttagatgctttacgcttcgcgggcgccgccacgcctactcctttggcgatttcttctgctaaatctgcatcgacattgctgaagacatcaacaacctgccgctgtacgtctttgcttttgaccttcccgacctcgaagcagaaagcagaaatgatgtgctgtttctccacaggagacatgctgttccagaaaagcttcgcctgtgagtaataatcgttgaagctgtcgcttcgctggcggatttttttgccctcgactttttcctgatagtggacgtagccgccttcttcagctgtcgcaggcgacggatcattgttttgcagtgagtttttatgataagcgacaggccccttattgatcgtcatccgatgataaccgtcatattgattgttatggaatggacataccggccggttaatcggaagctcatggaagttcggaccgccaagacgaatcagctgtgtatccgtataagagaaaagtcgcccctgcaatagagggtcatttgtaaaatcgatgcccggcacgacatttcccgggtggaatgcgacttgttctgtttccgcaaacacattatccgggttgcggttcagcgtcattttcccaatgatcttcaccggcacaagctcttccggccacagcttagtcggatcaagaatatcaaaatcaaacttgaattcatcttcctcatcaatcatctgcacgccgagctcgtattcaaccttgccgccgttttcaattgtttcccacaggtcacggcgatggaaatccggatctttcccggcaattttctgcgcttcatcccatacgagagaatgcacgccgagcaccggcttccagtgaaatttcacgaaacgtgcctttccttgttcattgacaaaacggaacgtgtgaacgccgaagccttccatcattctgtagctgcgcgggatgcctctgtctgacatcgtccacatcaccatgtgagccgactcagggttattggcgacaaaatcccaaaacgtatcgtgagcagtcgctgcctgaggcatttcattgtgaggttcaggcttaaacgcatgaaccaaatccggaaatttgattgcgtcttgaatgaaaaacaccggaatgttatttcccacaaggtcatagtttccttcttcagtataaaattttgtcgcaaagcctctggcatcccgcaccgtgtctgcggagcctttagaacccgcaaccgtagagaaacggacaaataccggtgtcttcaccgaagggtcctgaagaaatttggcccgtgtatattccgtcattggttcgtaaacctgaaaaaagccatgcacgccatacccgcgtgcatgcacaacgcgctccggaatcctctcatggtcaaagtgcgtcattttctcccgaaagtgaaaatcctccatcagcgtcgggccgcgaaccccggcttttaacgaatgctcatcctctgatactcgcaagccttgatttgtcgtcattttcttcccgctgttatcggtcctgtactgctcaagctgctcgtcctttgagtgttcatttacacgtttgttttggtcatcactcatgtctgctcccccttttaaaacgaaacattctacagcacatttacccgtggcgttcttcatataaactgctaatccgctcattaggatttttggtctacatataaatatgcggtcatacacatttgaaataagccttcttcacagaaagaaaggatggaagcgcttaccaaaaaagctgttgaataggggaggtcatatcatgcttgccatactcggttttgtgatgatgattgtctttatgtaccttattatgtctaaccggctttccgctcttattgctttgattgtcgttcctattgtgtttgccctgatcagcggatttggcaaagatctcggcgagatgatgattcagggcgttacagacctcgcccctaccggtatcatgctgttattcgccatcctgtatttcggcattatgattgactcaggcctgtttgatcctctcattgccaaaatcttatcgtttgtcaaaggagatccgttaaaaatcgccgtaggcacagcggttctgaccatgaccatttcgctggacggagatgggacaacaacctatatgattaccattgcagcgatgctgcctctctacaaacggctcggcatgaaccgtttggtgttagcgggaatagcgatgctcggttcgggggttatgaatattatcccgtggggcgggccgactgcgagggttttggcttccttaaaattggacacgtcagaggttttcacgccgctgattcccgctatgatcgccggcattctctgggtgatcgccgttgcttatatcctcggaaagaaagagcggaagcggctcggcgtcatttcgattgatcacgcaccgtcttccgatccggaggccgcaccgctcaagcgtcccgctcttcaatggtttaacctgctgctgactgtcgctctgatggccgcactgatcaccagcctgctgccgctccctgttctttttatgactgcgttcgccgttgccttgatggttaactatccaaatgtcaaagagcagcagaaacgaatctcggcgcatgcgggtaatgcgttaaacgttgtctcaatggtgtttgctgcgggcatattcacaggcattctctccggcacaaaaatggtcgatgccatggcgcattctctcgtttcactcatccctgatgccatgggcccgcacctgccgttgatcactgcgatcgtcagcatgcccttcacctttttcatgtcgaatgacgccttttacttcggtgtccttcccatcatcgccgaagccgcttccgcttacggaatagacgccgctgaaatcggaagggcctccttgctggggcagcctgtgcatctgctcagcccgcttgtgccttccacctatctattggtaggaatggcaggcgtcagctttggcgaccatcaaaaattcactattaaatgggccgtaggaacaacgattgtgatgacgattgccgcacttttgattgggattatttctttctaaatgtatgagcttgatcgtagcattgagtgagtacgtgatttacagaggggagaagatcaaataggatattatgagtgaatagaagattcatgccaacaacttctcattacaatcataagagcctgctatattgcagcaggctctttcacatttggcattatttttttgtatagcgcacccagtcataatgagcgtatagcggatttacaccattgtaggaaccaagccattcatcgacacccgtgccattccacaagttcatcatgatctttccaggtgttgtcggaatttggtttgttgcagtatgttttaattgcccgtcgacataccatttaatagagtttggctgccaatcgaatgcataagtatgataggcattggctgcatcaaacccgagatcaacaatcttctcatggtttcctgcaccatttgtataatagttaaattgaaccttcgttgtgtcttttcctaaaaattcgatatcaatctcatcccaaggagttccatctgttggacctgtgtaagtgaagaacgatgaaacgatccctgtgtttttagctggtttcattctgacttcataaagtccatagccatatgtttgaacagaacggttttccccgcagtcaaacttgttataagctgggcttgttagcgctaaacgcatttcacccaatgacgtcattgatacgttattagcccgccacgtgcagttgaacatatttccattcgaataaccatctgctttttgccaaaaaccggagttatagccgttaaaagggtcaaaaaacgatccacctgtttgagctgaggcagtagaagtgactgcaaacaaactcataaacaatccagtgacaagaagcagcaacactcgtttcagataaggcatattggcattcccctttcattgaaagcgttttctatgttgatcttacatgattcttttaaaagggaacatcggtcaaaataatgataatatcgaatcttactgacttgaatcctgtaactatcatcatcttccctctgaaaaaaataaaaacctaaattaccatcagcacagacagagatgatccgcactcattgtaatttaggttttgcctgctttatcagtaacaatcctaccattttcatatgtgaatgtaagaaaaaatgaatacaaggaaacaaaaatgtcagcgctctcattatgcttgtttaactaccctttctatgtgaatggttaaatacagcagctcgtcacttgtgagcttgtgctcatactcccgctcaatgtaggtttggattttcttcgtgcattcatacgcgcgatgatacttttctttcactgtatccagcaaaaaatcgtcctggctttccatgtgagtgccgttaaaaagacgctgcgcgaaaaactttaagtgggtgacgaaccgataatagtgaagcgattcttcgttgaattcaatcttaaaatggtattttacaatactcaaaatctcttgcatgacttttgtaatgttgataatattgggcatctcttcattcagctcggcatttacaatatgcagagcaataaagcccgcttcatcctctggaagagacacacctgtcttgtttttcaccatgaccaacgcttctttgccgatcgtaaattcgtctttatacagccgttttgtttcccacagcaaggcgtttttgatatcaagccctttctggttgcgctggatggcaaagttaatatggtcggtcagcgacacatagatgctgtcgttgagctttttgccgagctgtaattttgcgtagctgataatctcttcggatacttccatacactcgatcggtatatcatacaaaagggttttgaacttttctgatacatccttgttatcgagcgtgaacactttctcaatgcgggcttcatcgacatcatcgccggactttttctgaaacgcgagccccctgcccatgacgaccaattctttcccttgttcattgaccacgctgatcacattattgttgatcaccttcgcaattttcatgacatgtccctccaatcaactaagaacagactatatcttgattgtacattctttttgtactaggtcaatatcatcagggaaagacggaagctggtcagtacaattcactccgtacctgctgcccgggctgtttttgaagcagcgcctccagatggcgttcaaatgatgccttgtcagctttctgctttttgacaatgctgttcatgattttgacgctttcggcgctgtattgtgtatattgttttttcagctgatccagctgctgtcttgtcttcttcgcgtttttcggtgtgacttggccgatgagtttgatcatactgtctgcggtctcaaaaaaaacggctctattttctgtcagctgctgaatttcgatccggctcatgtcttgattacgcgttttttgtagcaaggcgaccgcctcgctgttttgttttttgagcgatttgttctcaagcttaatcgattcgagattctccttcgcaatgtctgcttcttcttcagtcatgttgcttcgcacgaagtattctggattaccgattccataatcaaatgcttcgctcacttgtatcatggaactgaacacaatggccagctgcctgtcgcttgcgagggcttggaaatcctgctttttcttactgctcatcggtttggctgcggtttgttttactgtcttttgatcacagtctgcgaacatctgagcctcaccttcactttcgcatgcgctcatcacaagaactgtgaccagcaggcttatacacaagcctattcgcctcatgctctgtctcctctctgctgaatcccttctggaaaataccataaaatatagttaaatggtaccagattcacctaaccccagcaataaatcaaaagtatgatttgaagcgcaaaaacataaatattttgtaaaaattgacgtgcattccattcttttcaggcccatttttcgtacaatagaagtatcgttaccggagagggggctctgatgatgaaacgttttacgaaacaagaaaacagctgggtattatatgactgggcaaattctgcttactcaattgtcgtgaccaccgcggtatttccgttattttataaatcagcagctgcggaaagcggtgtcagcgccgctcaatcgactgcctatctgggctataccattgcgatttcaacgtttattcttgcgatgctcggccctattttaggcacaatcgccgactatgaagggtgcaagaaaaagttcttcggtttctttgtgtcagtcggtgtcgccagcaccgcgatgctcgcctttatccctagtgaacattggctgctattgttgctgttttatacgatatcggctatcggtttttccggcgccaatgtgttttatgatgcctttctcgttgacgtcacgcctgagaagcggatgaatctcgtctcagcacggggttttggcttaggatacattggaagcacgattccatttatcatcagtattgctgtcatcctgctcgcacaagcagagacgattccagtgtctgtatcggccgcaagccagctgtccttcttcataacggctgcctggtgggggctgttcaccatcccaatgattaaacatgtccatcaacgctattacatcaaaaaagaacctcatattgtcatcaacagctttaagcggctcggccaaacgatgaaacggatcaggcaataccgggcacttttcctcttcttgctcgcttatttcttttatatcgacggagtcggcacgattattacgatgtcgacatcctatggatcagatttagggatcggctcctcaagccttctgatcatcctatttgtcacccaggtagtcgccgcgccgttttcgattgtatacggaaaactggcagaacgcttcacggggaagaccatgctgtacgtcgggatcgtcatttatatgatcgtctgcgtgtatgcctattttatggagacaacgcttgatttctggatactggctatgcttgtcgccacctcgcaaggcggtattcaagccctaagccgttcctatttcgccaagcttgtgccaaagcgccacgccaatgaattcttcggtttttacaacatttttggaaaattcgcctcaattatggggccgctgctcattgccgtgaccgcccagctgaccgggaaatcctcaactgcggtgttcagtctgatcattttgtttgtaattggtattgtgattctggcctttgttccggaggagaccagcgccgatgtcagccagcagcaaaatgacctgcccctttaactgggagcaggtcattcatcatttattcgctttattcaccttcagctttttccctttgacggttgtgttcttcatcactttgagaacatgagggcctttaccatttaagatctcaacgtatgaggcgttatccatgatcgtgatgatgccgatgtcgtcagctgacacaccgtcaattttggcaatcgttcctacaaaatcaacggctctgattttctttttctttccgccgttaaaatacagcttcataatgtctttattcagctcttcgcttttgtcctttttgctttccggacggtcattcagtttagctagaaattctggtttcttccttgccacttcctcttgagaaggtgcttctattttttgaatttcaaatccgatatattcttcaatgtcggctaaaaaccgtttttcgaaggccgtgacaaacgaaatggcctttcctttgttccctgcgcgtcccgttcggcccgtgcggtggacatagctttccttttcaaccggcagatcatagttgataacaagggagatattttcaatatcaatcccgcgcgcggcgacatccgtcgccactaagtaacggtactcgccacgtttaaattcattcatgacgtcgaatcggtcttcctgaatcattccgccgtgaattttatcgcatggatatcctaagtcatccaattcatcggtcagctgattgacgtgctccttcgttcggcagaaaatgatgcagctgtcgggattctccgtcatcagcacatctttcagcaatgaaaatttatgctcttctcttacttgaatcaccgcatgttcaatatttcttgtggtaagcccggccgctttgatttcgatatgctcggggttttgcatatattgacggctcagcttctcgatatcctgcggaagcgtcgccgaaaacagcatcgtcgtacgctcagtcggcagatgcttgataatcgcctccacctgctcaatgaagcccatattcagcatctcatccgcttcatcaatgaccaaataagagagacgatccaacggcagcgtgcctttttcgatatgatccagaacacgtcccggcgtgccgacaacaatgtggcttttttgcttaagctcagctttttgtttatcaaaggaggattttccaaatacggctgtcgctttgatccgtttaaatcgtccgatgttcgtgatatcttcctttacttgcaccgcaagctcacgggtcggtgttaaaataagcgcctgcggcttgttttcatcccaattcgccagctcacagagaggaatcccgaacgaagccgttttcccgcttcctgtctgtgatttgacgacaagatcctttcgttcaagggcagcggggatcacactctgctgcaccttggtcggttctgtatatcccagtccttccaatgctcgtaaaatgtcatgactgatttgatagtttttaaaatgactcatgtataaactcctgtctcttgcagatgttctcattatactctaattgaccaaggcatatgtgttttgtcgaaaaatgatgtattaaaagccagcgattccctggcgttttagctcctgaacagccaatcgcgccagtgcgtcggcccccgcgcgattcgggtgcagcgtatctccatccatataaagcccgagtgttctttccggaccgatcgatgtaaagtatgccgagctgaggacatttaagtcaatgagatatgttttttcctcttcggccaaagctaaaatagaggccctgtaccatctgtttacagacgaatggatgccttcagaagtaaaatcggttgcccggccctgaggcgttgataggatgacgtccgctcctttcgcttttacctgacgaatcatatcacgcatcatctctttaaactccgcttcagattcattatgcttcggatttgtgtcattaatgccaagctgcaatataaaataatctcccggtttaatatacttcaggatcgcctcaagctgtccatcatttctgaaccctctcgcgatctgcccgccggacgccatgtttctcacttgaaaggtgtgtttatcgatatagtgaggcagcatctgcccccagcccgcctgcttgctgctgttgagcggataataattgcacaccgtcgagtcgccgccgacataaatggttcggttcgtcaccggctgatcagacaatttctttattttcaaggcgctaagcgtaaaagcggtgccggctttcccctctgtcaccagtagattcagctgcccgtcggtgacaggaatttggaacgtatcctccgcgccatcccctgtcatattgatgacctgaaacacgccctccgccgccacactggcccttgccgtattgccaagcgtcgccttcacctcataaaggccgttcgggagatccacttgaaacgtgttattacttttcgtcccatacgctaaaaactgaaccgcatcactcttcactccagtcccagatgctgccacatccttcatattctctggtgtttgaaagccgtagccctttgaccggtcataccgattagacgccctgacaccaatataaccaggctcaaccgaaccgtttccaaagtcaaactgatacaccttctgctccgctgccttcacactctcattcccgtcaaaacccaacatcaacatcatcacaaaaaccgttgccatccattttttcatcaagactccccctctatgaaaacgcatacattaatgcatactcggtgattgtttctttatgatgactgaatgaagaaaaaaatggcgttgaggaataaaaatgaggggagagtctcaagaaggggaaaatcagtgtgacttcttgtcacacttgatcacatcccaacctccgcaatagaaactcatctgatcttcttgatcatacacataataacggagtctttcccattgatcgtcagtcggttcaatctccaactcaaccgcatcaatggattcaaggtcatccagccttgatgcactaatgtcttcaaaccgcaaatgaatgtcacaggtttgagctgatcgttttcattcaaacacaggaatatgaatataacgatcatcttctttcatatagaaagaaaactcgtttaatgtaaatggacctgtatcctcatcagaaagatgctttttcaatttctcgtattgtgtgatattcaaatgaattcctcctatttttagttacctccaaccatatagatctccgcagcatcgtattcaaaccatatgatccgttcgcctgagtccgttaggcattggagcttcccttctgaaaaatagcttttatccggttggggatcagtgatcagaaaaacatcatcattgatggaagctaacagaaagagaaaatctgcaatatcccggtctgcttcctgtaatatggattggaaatggaattcccttttgtccagcttcgtcaccttgtaagcatgaccttcaaaatactcggacaggtcttctataaatgaaccagtcgttattacctgtatcatgattcgatcgtaggcaagccctgcccaaaaacgataaaacgactctgcatctttaagttcgcatgacataacggtttggtcaggcttaagctcgatcatgtccaaattgccaatactgcttatagaggttatttccataaaatcttccccttatcagttggatagcgcaacgcaaatctcttgtctgacttgttcatacaagagaatatgatgatacagatccttatcgttttcgatcatatccggaagtatgtcaggatacagctcaaaaaagcttttctccaacgaacgccgctgttgccggggcatccttttattcgccagcacataatccaaactgccatcaacaagcataaaaaactcatagatttccgcttcaaagccgtacaattcactaggatacggcgtttcttcaagctctcgctgtctttttttcagtttttcaaacacgccgactctctcctccgacacatgttaaataacaaactaatctatcttgaaacaggataggcggatatttatctatcgcctccaacaggtcttcaccaaacacagtgattgtcaatttccacgggtctcccaaaagtccccaagagaagtcctgatgaaaaaagaaataatagtctccatttggaaatacgggaacaggccattcgccaaattcatcctgaggcattgcctgatgagggctaaacatatatccgtcatgctgccaatctagtgcgtacattacttcgttctttccagtacctaattgaaatgcttttaaaatagaagcctctaaatcactcagcactccactcacatcattatgaccagctttactgctcatcgcgcttgagatatcaaacactcgatatggctcaggcggaatgatgtgatgccatctgcttccgggtttccattttatgagcttgttcacttctgaccagatgcggtcttgttttgtctgacttaaagcgcgccaattcatcatgatctcatccctacacctattggatatcctgtttgtaaacaccagaagaggccactgcataaacagcgttacttgtcagtttcagctgttgaacgtctagggcttcaccgttcgagtcacagcatgttatctcttccatctcttgactcacatcggcagaaatcaaataaagagacgactcaagctcttcactgtaacaattgaacgtcccaaccaaaaaaccttcttcagatatcgcaagctgataaaatgcttctgagttcggctctttatccgacagaatccatacccgtctcacgaccgtgtcgtcaaacgcggcaatgactgcatctccgtaatacagcatataaatcaagccgtttttttctgcaagtccataacaatcatctacagccggcgcatccatttcttcgagctttctatcaaagtgtatttccttctgctgaccatccaaagtaaaacaccaaacactatgcccatcaggattttcatcatcataaatgccttcatcatttaaaccgacccaaaggttttgtttctcatccaaaagacagcaggaaacccctgaaggcaagtgaaaagcacttttcactcttccctcttctgaaaaaacctttaccttcggctcatacgattcgtaataaacgaagacatagccatctgcacattgttgaaagagcagaatatcactgtatgaaatctgctctttggctttaaaaacccgaatatcaccggaaggatcatagattgaaatggtcacatcatctttcacaccttttccaatgtagacacgccccagtggatcagcatggaaaaaacaatcttgggtgtccgtgttgatgactttattcatttttaattttttcatttgttatgctcctaggttagaaatgaagtgataattaagcatttattagctattagtaacggacagcctagtttcattaatcgttttgatataaagctactttccaattcagtcttaaagcatttagtatttaattggtatgcataaaacgattgatcatcaaagcgaactgtttcagcttcaatagcaatcagcattctgttcatgtcaataagaaagttagcatttgattgatactccggaattatataatttgatagattctcgattccttctggatgataactcatctcaaatacttgccaactgtattcttccggatctattttttccaatctcatgtcgccaacatctgcactataataagcggatgccacattttgaaatgatattttatgcgtatattcaccttcatcttcaaaaaccttaatatcaagtgagagttcttttttaaacacattaaaatctaaatgaagaacactgcacccctcatctatataatcaacccattcattaatcgtttgatacattgtcatcccctgcttctttttaatcaatagcgcctttccaccaagcagaaagcaaattactccgtatattgtttgatccaatcatttaaatcatctgttgaatgcaaataagtttcaggagaatctttcaaatcaattccgcttaaaaggattaacatatcccagactctaccgttttttactttagggtcatccgcataaatataagggcccgcccaatctgacacttcttctcttgttgtttgtccatttaagacacttttgattttatttatgcattctagtagttttggctcgatcaaattgatcaccacgcactcaatattcgtttggtataccgacaattctatttattttattaaagcctgctgagcaatcagatgatcaacagacaattcggtaaaagatcctctaccgaatgaattctattattcgctttgaagatccaaacaaagtatttaataaatgttattctcattaacaataattgcatttttatattcttctgctgatgttttcataaaagaaatttttttatgattaaataaagtattagtttttaaatttgcagagtatatataatcattactatcgctttttaataccaactaagttttcaatatattatatgctctattgttttatttttttcaagccaatcatagtcattaagagttgatatttcatcaaaatagtacattcacttttccttttactaattgagaaagctttttttcgcaccaagaatttgaaataactgtattattgatttaacatgttagcttcattggaataggattacaatatttttctggaacgtttatgttattttaagaatcaaaaaaaggccgcataggcctttttacattttccattattgcatttgttcaatatccgtaccctcagctgtcacattcgccttcccctgcctcctgacaagcgtcaaggccatgcccgcaaagatcattacgatgccaagcgtttgatagaggtcagggcggaaacctgtgaagacggtatcgagcacgattgcgacagcggggtcgagaaatacaatgattgaaataaatttcgttgataaaaatcgtaaactgtcaaaaaacaacaaatatacaatacccgtatggatgatgccggtagataccaccataatccagtttccctgagataggtcagcaaaagcgccaaagtgaataaacggaatcaggatgataacccctaaacccgtctgcaagaaggtggtcgtgtaaggactgagattgtgaatgccttttcccaataaagtggtgaacgcataaaacagtgcggcgagaactgcccatatgatccctgatcccatcagctgtgtcaatgaagtgctgccgttaatcccggaaatcagcgcagttcccagaaagcagatgataatggagctgacggagatcacatttaatttctctctgtagaggaagctacccagaagaagaacaagcaccggcgctagatgataaacggagatggcaattgtaacggacgtttcttcaaaagacttaaataagaacacccagttgaatacaagaaagaaaccgcacaccaatgtttgcagcacgtctctcttgctccatttttcagttttatactggccggacgccagccagcaaaggcctaaaaacagcgtcgcgcaaaggcagcggacaaagaccaattcaaatgacggcagattagtatgctctgagaaaaagccgatggagccgaaaatcaccatagagatgaccattttgattacggctgttgttgatttttgttttggtgtgattgagagatcttgctgcatcaagcgtattctacctccaattatgtatagggaaaagcaccccaactgcaaggtgcttttccttttttatagtttcttgccggccgtccagccgccgtctatgacaaagtttgaacctgtaataaagtgcgcctcatcagaagccaaatacttcatacaggaaacgatatcactcggctgcccccacgtatgaagggcatggttatctttgatcagctgaaccatttcatcgtcttgaaaatactcttccgttaattctgtttggatcacgcccggcgaaatgctattcaccctgatcccctttgatccgaactccatagcgagctgcttcgtcagtccgatgatcgcatgcttggaagacacataggcagcccgcgcaggctctgccatcagcccggacacagaggcgatgttgattatacaccctcgtttccccagctttgaccacagccttgccgcgtcccgagaaagaataaaggctgccgtgagattaatgtctatgacctttttgaatgattctgctgataattcaagaacaggggtaatttcccttatccctgctgcattgatcaaaatatccgggatcagccggcttttttcaagttttagcatcaaagattccgcctgccggacatcagacaagtctgctttttccatgtgaaactcactgtttactataaattctgacattttattcgtttgaatatccactccaacgactcgaaagccttctgttagaaattgctttaccgccgcaaagccgattccgctatttgccccagttatcattatattctttttcttcatcattttacattctgccttttttcactttggtaatttgtaataatctgaatattattatttgacaatatattacaaataatttagcattgcactacatcctctattttccacattttctatcatacaggaaattactaaaaaaaacatctactttttaaggagagattcatatggttcaagtttcaaacgtacaaaaagagttgacatccgatatttctaaatatgcttcttttttaaaggaaaacggctattcgtatatcccagcagatttctatcagcagaaaacaacagacgctgcagtccgcgaattacagcttacatatgatgatttgaaagctgattctaaaggaggcggccgttacagagcgcattcccgctacattttggctcctcactccgacactcttgaattagatccggataatggatatttccaatcaaaagaatataattatgatgatggcggtatcgtcagacaattcgaaaaaatatcagatgagtttctacagcatcctgtaacgcggcacatgatacattcaaatgtagaaatggctcgccaaaccgattttgtagattgggagaaagaagtgatcgtcgggcttcaccaagtcagatatcaagtgacacctgacgcgccttcatacagctcacccatttggctgcatcgtgacgatgaaccgcttgttttcgtccatctatttcagctgagcgaagatgctatcggaggagataacttaattgctccgtctgttaagcaaattgataaagtgctgcggctgacagacccgcttgagacacttgctctcgggcaaaaggtctttcatgcggttacaccggtcggcactgccaatagagatggtgcgcatcgagatatattattagttacattttctaacagataaaaaaagcgcccttgggcgctttttttacaaatctatcgaacaattaaaaccgggcatgttgataattgagacactttatggctgacgcttccaagcatcatttctttcaggccgctgatcccccggctgccaactacaatcaggctgacgcctttctcttttgcgtgatttagtatctcatgcgccggctcgccattcgcgtaaatggtttcagcttgaacgcctttttcggctgctttttcttttgcattctcaaggattttcaggccctcttttttaacctcgttcctgatttcatcaataaagtgttcaggcacatagacaattcccgtcagagaagaagtcgtgacgacggcttctctccccacatgaagaatgcttagttccgcttgttgctcttttgccaaatgcactgcggcatcaagcgcttttgcactcatgtctgatccgtcaatcgctactaacattttgttaaacatgctcttcccgcctttcggactgtgggtggttcatctttctcttttattgtccgcctgcatttcgttattgtcaattgaagcgcatgagttttcaaaaaattgtcagagactctctccgtttgtggcgatgacctgctgataccagttgaagctttttttcttgatgcggttaaatgttccatttccttcattgtccctgtccacataaatgaaaccgtagcgttttttcatttccgcagtagatgcgctgacaaggtcaattggcccccatgatgtgtatccgattaattcaacgccgtccgcaatggcttcgcgcgcttcaattaaatgatcacgcagatagttgattctgtaatcgtcctgaatcgtgccgtcctcttcaaccttgtctacagcgccaaggccgttttcaacaatgaacagcggcttctgataacggtcgtataaggtgttgagcgtgatgcgcaagcctttcggatcaatttgccagccccattctgatgatttgaggtaagggtttttgactccgcccagcaggttgccccctgattttgcaagctcttccggatctgtgctcgccgccatcgacatgtagtagctgaatccaatataatccaccgtatgttctttcaagagctcttcatcgccttcaaccatttcaatttcaatattgttttctgccagatagcgtttcatatatcccgggtatacgcctcttgcctgaacatctgagaagaaaagtgttttgcgctcattctccattgccgcgaagacatcctccggcttagaagtcatcggataggttgtcgttgccgctatcatacagccgattttcgaatcaggaatgatgtcgtgacccgctttgacagcaagagcactggccacaaattggtggtgtgccgcctggtacatcgcgtttaatttgttttctccttcttcaaaaacaagaccgcctccggtaaatggcgcatggagcactacgttaatttcattaaacgtcatccaatacttcactttgtgttgatagcgtttgaaaaccgttttggcatagcgttcataaaactctatgactttgcgattcttccagccgccataatttttcactaaaccgagcggcatctcataatgagagatggttacgacaggctcaatatgatgctttaacagctcatcaaacagatcatcataaaatctgaggccttcttcattgggctcctcttcatcgccattcggaaaaattctcgtccacgcaatcgatgtgcggaacgccttaaatcccatttctgcaaataaggcgatatcctctttataacgatgataaaagtcaatcccgttgtgatacagattcaaggaagtcattgattcatcaaatggagacatgatcccgttcggcgatacgtcagctgtcgaaagccccttaccaccctcgttataagcaccctccacttggttggcagcaactgcgccgccccataaaaatccttctggaaatcgtttttcatttgaactcatattgatcaccccattagttttttcaagataaagcaagcagcgcttcttttggctgcactttaccgatctctttcaccggcgaaaacgaatattggtctgtgttggtcacaatcaccggggtaatgacgtcatatcccgcggctttgatttgctccagatcaaaggacacgagcggatctcccggtgcgaccttgtcgccttctttgacgtgagccgtgaaccattgtccctccagcttcaccgtgtccaatccaatgtgtatgagtatttcagctccctgatcactcgtaatgccaattgcgtgttttgttttaaaaatggtggtaacgcttccacgaacaggcgacacaacttctccttcttcaggctcaatggcaaatccttttcccatgatcccggcagaaaatactccatctttgacttcacttaaggctttcacttctcccttaatcgggctgtgaatgatctctctgctgccctcatgcactgccggctgctggctgccgtcagaaggcacatcctcgaatccaagcaaatacgcagctgctgttcccgccgcaaacgcaatcacaaggccgatcatcgcgtaaataaacgttgggccgataaagacagggatgctcgggagacctgcattccctccgacgatataggaagcaacacccgtcatgccgtaaaacgcgccaccggctgcaccgccaatcaaagcggccgcaaacggctttttcaatcgcatattcacgccgtacatcgcaggttctgtgatccccatcagcgccgtgatgcttgtggtaagcgcgagtgatttaaattttttgtttctggagcgaaggaagacggcaaatgatgctcccgcctgccccatattcgccaaaaacatagccggcagtaaataatcgtggccgttttgagcgatgttgttgatcatgatcggcacaaaggcatagtgcatgcccgtcataatgattaaagagaatgtacccgccagcaaaatcattgccacaagccctgcatgatcaaacaaataattgaccccagaagacaagtattctcctaaaatagcgccaagcggaccgactgtaatcaatgtcagcggcacgacaatcaatagcgtgaatgtcggaaccacaatcaatttgagagatgcgtgtgtaaaacggtcaatccatttttccacgtatgaagcaatccaaatcgacagcaaaatcgggatgaccgttgacgaataagtggcagcggttacaggaagcccgataaaggaaatcggtttccccgcaccgagcagggctgtcaaatccggatgcaggatcgccgccgcaatggcagccgctacgtacggattgcttccgaattttctcgccgcactcatcgctagcaggagcggcaggaagtagaacgcaccgtcaccgacagccgtcaaaatgacatgaacctggctcttctccgccatccagccaaacgtaactgccagcgcaacaagccctttgatcatccccgctcccgcaatcgcaggcagaatcggggtaaacacaccagaaatcacatcaaagaccgcactcagcacattctttttctgagaggatgaaccagcgctcttttcatcactgagattgctgtgccgcacaatcgcctgatacaccttcggcacatcgtttccgataatgatttgaaactgctcgccgctgatattggtgcccatcactccaggcagctgctccaactgactgcgatccgccttcgaattgtcatgaagattaaaacgcagcctcgtcatgcagtggatcacgcgctgaacgttgtcttcaccgcctacgagttgtaatatgtccttcgataatttatcataatccatgtgtatacctcctttttatggggggactgctggaagaaaggtggccgcctttcaccagctttttttctatcaaatgctgcatcacctcctaaaagagaataaaaaaaacctaaatgacacagattgcgagagtctcctcctgcacctgcaccatttaggttttgcctgctttcacagtaacaatcctgacgggtcgttttatttgtttgtaggtatactttagcactagatttatcggatgtcaacgctttcatttttgagttttgactaaagggaattacttattgaggactgctttgttatagagggaagccattttgtatattttgttttatttttctgaaaatactatcaaatatatcagctgacttaatataaaagtaaaaaaccttgaaaggcaatttagcccatcaaggtatatgttttatttttgactatcccttttccatatactttctccgtcagttaaaaaaactgcacttggcggatcatcataaagtgaaatttcaactaatgaacctttcttttgtattaaccaattatataaactactttcttcactagtaggatgagctaaaatatcatttacttgaaatgtaactgcataatattcgataaaattcacatcatcgtcatccaacccattgtctgtttcaaagagtgtgtctggttcaccaataatctttaatccactatcccactctattatcaagtcactatctttatactcttttaacgcttttattaaaggatcatattccatgtatatcctcctcaagagaaaagtctctgcaatcatgccgtgagagtcagattctacagaggaaatcgcatgctgtgtttgtttcagtacttttttgtattcgtcgataaacatgccaaagaaaaggagaagggtttatgaattagctttataaaagattatttttattaaaaaaccttgaaaggcatatagccagtcaaggtatgataacaataacattatatttagaagtatcaactacttcacctactgatttatctgagagaatatcataattgttttatatattctttctaataaaataaggctattttaaagtaactccactccaacttgtttgcaaaatttaactttaagtctctcttcttgacccacattcattaccataactttgtcatctttttttatacttgttacattattaaaatcacctgtaaatactatagaatcattaaatgtaatacttagactactcgtttgcttatatacatctaaagttaaaatcaccttgaaattttggtcatctttgtaagtataaattaattctccatcatctatattgcctgttatactcaccggctcactttgaaaaagttctaatagatcatattcatcatactttataaacatttgtattcatccttttattaattatttcggtataactgtgataacatcgcctgcttcatttattattactttgacatccagtgtttcatgaacaaacgttccgcttctattaccaggtatctttttcgtattcattatagcgtcttcaataactgaaggtgaaatatttcttgggtcaacatattttttgataaaatcactaaattcttttgtttgtggtttatatcctaattcttcagcttttttaattgctctacttgttaaagtagcttttacttcaggaatatcaggtgccattctttccaaagcatgctgagaatactttcttccatttatttctcctccgccttttgacatgttccaaccaatttcacccttacccttagaagcaactttattaacctcacccttactttccttctccgcaacatgtttagccacatctgtgacaacacgcttcccgcctcggaccgccaattttttaatagcgccctgaggacttacccactcaataaattcatattgagttccggcaagaaacgaatcaattggcttagctccgcctactttatcctctggtatgtaagacacttcttctagccgctttttccctccagcatagaattctcttacgatctggccgttttcataaacataatatttgccgccgacatagtcgatgcttgcagtattgcgagttagttcgtcaatcacttctatcgtatctatcttttttaatcttttattattatatagtttatcatttatcacccgtatgtctccatagactttcgggtgagctgctgcttctttctgtaatacagttacgttactgtcatcagcatgaatctcacgctcgatcttctgttgtttgccatccttcatcacgatatcaacgttggactgcttatgtttctctattttcttcagcatcatctccatcggtgaatcatccggctgcttcatttgcgagttaatgccgccgaaggtttggttgatgttttcttcttcctgtgatttcaggatagagccgcttttgtagcctgtgatttcaattttcggaccggtatacatggttccgagctggtctatatattttttcatcgtttgaaaatctgattttgcggtttctaatgcttgggtttgctggccgtcaaattgaaagagcttattcagggtgtctgaaatcagccgctcagcctgttctgtttccatccgaaaaaaggaatcattgactgtcggcaggctgacgatgtgatcgatggctgatgtttggcgattgactgcgtcagtgagctgctctgtcacttctcgtgcatgcttgaccccatgtctcgcatcgtgtgagagaaaagcctctgcgatcatgccgtgggagtcagattctacagaggaaatcgcatgctgggtttgtttcagcacttttttgtattcgtcgataaacatgccaaagaaaaggagaaaaggcttgtggcactcctcgtaaaaggtccggatggcatctccgccttttcctttcagcgcatccctcatgcctgccagatgctcaacgcttttttccagcttctccagctgttgtttttgcttgtccagtttctcaatcgtatgctgaatgccctcgtgaagagcgtggacatctaatgttttcaatcccttgtcctcccgcgctttatttcatggaagatgatatgttttcgtccgtttccttcatggcgtttaccgcgctttccgtttgtgcgatatgcttggccagaacagacgcatatgcttcagtgagctctttgatgtccttatttaattgctcgatggacttcacaacattcaaatggtttctgcctgagagatggccgggtaaggaggacttgagttcagctgaattcttgagctgagaaagcccttgcttcactgtgccatacaccattttaatttcctgtgccatttgtgctcacctcactttttatgtttttctttctctatttcatgctctatcctcgtaatttggcgtcttatggaatagacatcgccctctaatgagtggatttttccttctatgctttcgatgattccgttgacttgatcgcttttgatttgctgatatgctttgttcattccttcacgaatatcttcaaaccgctgagcatgtgttcctctccatgcctcccggttaagatgaggccggtgaatgagatgctgggcctcggagaattcgtgtttgatttgcctgatttcgtgcagcactcgttttaattgatggatctgttcctgcttttcatgtaagtcggcttttaccgaatgtaacaacatttcactatgcatgccgcaacacctcgtgtttctatcaaactgtgtcaattctttacaatacagactattttcatattacatgatgggtcatattggataaataggtaaaaaggattgtcttgaggaactttataccggttctaaatagctaaaaattcaatttcataactttgtaagagggagaatcatcatattggggacttttcgtttaggtcttgaaccccgcaatcacttctgttttttctctcgctcaaccatttcttatagtcaataaagctcataaaaaagcgccttctctagaaggcgccttctccatcttatttagatccccatacagcctcaccgttgccattcaaaacactaaacgtcatgacgttcttctctctcaccgaatcccactggcgtaaaaataccccgttatacttcttgccagctaacgtgatgtcgactgtgttttttccggttttctgccatgttccggtcatttccccggaaatggtgtggtttttgttgagctggataatgatggtttgtttgatgtcggctgagatgtcttttccgtgctggataagtttgtatgttcctgtgatgtctttttgttttacttctttcaatgtttcgcccgcataacgatatggtgctgctaccggccagccgtctttgttcatgaacaattggtggactctgacttcgtgttcttcacccctgcccgggaagcgggtgtggaagattaaataggaacgcccggttttttcatcatagtatgcggagttgtggcctggtgagacgtacccggtgcctttttcattttctgtttcaaaagtgtagctgcccatgagtttgacgccgtatggttcgatggaacggtcgtcgaagaatgtgccttctttgccgcggacgtcaagcattggattgccttctgcatcatagtaagggccgtctggtttcttggagcggaccacacggatgttatagccgcctgttgcatcaagaccgccatatgataggtataagtagtagtatttggtgtctggattgtagagaacatacgggccttcgattctgctatggttgccgccgagcagttttttcccgtatccctgtccaggaagcgggaagcccgttttcggattcatttcaagtatgaaaatgccgcctgagtatgatccgtacaccatccacagcttgccgtctttatcaaagaaggtatgcgggtcgacgacattcggatgtttggttgcgtcatacggtgttccatcgttgcttgtgccttccattcctgatttcaaaaagatgcctttgtttttgtatgggccttcgatgttgtcagcaacggcaacacccatggcggatcttggcgaatcgccgcggcaggcgttgtagtacatgtagtatttgccgtccgccagctgcgtgacgtcagccgcccaaagagtatcggattgcgcccattcgaaggtttcttttaattctttatagacattcgggataagtgggttgtcattgcttacgctggtggtcagctgctgccattgcatgaggtcattcgatttagctgaagcgagatgagatccaaaaacataaaaagtgccgtttgtttcaatgatggaagggtcatggacgctgacttctttaaatataggtttttgtgcatagacggagtttgggagggtgaaggccatgataagagctgcaagaaaacatacacagaacaatcggttgaacatctaaacaattcgcctctcttttttattaaattttaaacgcttacatttccctatgaagataccccggcctattaaaacagccgaatgttttcatattcaaacagataggtgatttctcactgttctcttacatagtcagactgatgtctgtctgttttgcgcagaactgctgcttgcatacctctattcatagttcaacccttttgccgtttctccttcttcaattacttctgtttcttcatttgcgtacataatgaacgctttgtccggtcttgtaaagtcgtcgacttttctccggcaacttcgcctctttttggcattttacctctcattgtcagcaatatgacagcggccgcttgcacttctgtctgggtatgcgtgtgcaatgtgctgctttctgcgtcacactattacaatagcaatctaacttgttaaagactgtaaaaaaccttttgacttctgctgctgaaccaattaatataatactcagttaatagttatcagaatttttaggaattgagtgattcatatgacactgcataaagagcgtcggatcggccggctgtctgttctcctgctgctgaatgaggcggaaaaaagtacgcaggttgaggagctggagcgagacggatggaaggtctgtcttggcaaggtaggatcaatggacgcgcataaagtagtagctgcaattgaaaccacttccaaaaagagcggtgtcattcaatctgagggttatcgggagtcacatgcgctttatcatgcgacgatggaggctttgcatggcgtgaccagaggtgaaatgctgctgggatcgctgcttcggacggtgggcttgaggtttgccgttttgaggggaaatccttatgaaagtgaagcggaaggcgattggattgctgtctcgctttacggaacaatcggggcgccgattaaaggtcttgagcacgaaacattcggtgttggaattaatcacatatgaaacagcccatagatcttagacaatagggggctatgcgtgaaaacagatgttcacagcatagctcctttttgtatgggcgctttaccaaagtaaagaaaaaggagttgggcttatggtgactttagacggttcttcattgacaacagccgacgtcgctcgtgtgctgtttgattttgaggaggcagcggcttccgaggaaagtatggagcgcgtgaaaaaaagcagagcggcagtggaacggattgtacgcgacgaaaagacaatctacggcatcaacaccggatttggcaaattcagcgatgtcctgattcagaaagaagactcggcggcgctgcagctgaatttaattctttctcatgcctgcggagtcggcgatccttttcccgagtgtgtgtccagggcaatgctgcttttgcgcgccaatgcgctgttaaaaggcttttccggtgtccgcgctgagctgatcgaacagttgcttgcttttttaaataaacgcgtccatcctgtcatccctcagcaaggatcacttggcgctagcggagatttggcgccgctttcccacctggcgcttgcgctgatcggacaaggagaagtcttttttgagggggaaagaatgccggcaatgacaggcttgaaaaaagcaggtattcaaccggtaacgctgacatccaaggaagggcttgccttgattaacgggactcaggccatgactgcaatgggggtggtcgcctacattgaagctgagaaactagcctatcaaacagaacgcattgccagcttaacgattgaaggtttgcggggaattatcgatgcatttgacgaggatattcactcagcacgcggctatcaggagcagatcgatgtcgcagaacgaattcgcttttatctatctaacagcggcctgacaacctcccagggagaactgagggttcaggatgcctattcattgcgctgtattccgcaagtacacggtgcgacttggcagacactaggctatgtcaaagaaaaattagagattgaaatgaacgcagctacagacaatcccctcattttcaatgacggtgacaaagtgatttccggcggaaactttcacggacagccgatcgcctttgccatggattttctgaaaatcgcaatatcagagcttgcgaatatcgcagagcgccggatcgaacgacttgtgaatccgcagctgaatgacctgccgccgttcctgagccctcatcccggtctgcaatccggtgcaatgatcatgcagtatgccgcggcctcactcgtttctgaaaataaaacactggcccatccggcaagtgtggattccattccgtcatccgccaaccaagaggaccatgtcagcatgggaaccatcgccgctcggcatgcttatcatgtgatcgcaaatacaaggagagtcattgcgatcgaagcgatttgcgcattgcaggctgttgaatacagaggcatagaacatgcagcgtcctatacgaaacagctttttcaagaaatgagaaaagtcgtgccgtccattcagcaggatcgtgttttttcctatgacattgaacgcttgactgactggctgaagaaagaatctttaatacctgaccatcagaataaagaactaagggggatgaacatatgactgatgtaaaaaaatcaatccgtgccaacagaggaacagagcttgaatgcttaggatgggagcaagaggcagtgcttcggatgcttcgaaacaaccttgatccagaagtcgccgagaagccggaggacctcatcgtatatggcgggattggcaaagccgcacgggattgggacgcttttcacgccattgagcattccttgaaaacattaaaaaatgatgaaacattgctcgtgcaatccggaaagcccgttggcatgttccgtacacacccgcaggccccgcgcgtgctcctagcaaattctgttcttgttccgaagtgggcagactgggagcatttccacgaacttgagaaaaaagggttaatgatgtacggacagatgacggctggaagctggatttacattggctcacaaggcatattgcaaggaacctatgaaaccttcgctgagttggcgcgacagcacttcggaggcagcttaaaaggaacgttgacgctgacagcgggtctcggcggaatgggaggcgcacagccgctgtctgtcacgatgaatgaaggcgtcgtcattgctgtcgaggttgacgagaaacgcatcgacaagcggatcgaaacaaaatactgcgatcgaaaaacagcatcgattgaggaagccttagcttgggctgaagaggcaaagctggcaggaaaacctttgtccattgcacttctcggaaacgcagctgagatgcatcacacaattttgaaccgaggcgtcaaaattgatattgtgacagatcagacatctgcccatgaccctttaatcggttatgttcccgagggctattcccttgatgaagctgaccgtttgcgtcaagacaatccagagctttacgtgcgccttgcgaagcaaagcatgaaaaaacatgtcgaagccatgctggcctttcagcaaaagggctctattgtatttgactacggcaacaatatccggcaagtcgcaaaggatgaagggctggagaatgccttcgattttccggggtttgtccctgcctacatccgccctttattctgtgaaggaaaagggccgttccgttgggcggcgctttccggagatccggcagatatttaccgtacggatgcgttattaaaagagctgttcccgacaaataaagcccttcaccgctggattgatatggcacaggaaaaagtcaccttccaaggcttgccgtcccgtatttgctggcttggatatggagaacgaaaaaagatgggcctcgccattaacgagctggttagaagcggggagctaaaagcgcctgtcgttattgggagagatcatttggactgcgggtctgtcgcctctccaaaccgggagacagaagcgatgaaggacggaagtgacgctgttggtgactgggctgtgctaaatgcgcttgtcaacacggcggcgggtgcaagctgggtttctttccaccatggcggcggcgtcggaatgggctattccctgcatgccggcatggttgcagtggccgatggaagtgagctggctgacgagcggctcgcgcgggtcttaacgagcgacccaggaatgggcattatccgtcatgcggatgcgggttatgaacgtgccgttgaagtagcgaaggaacaggacattatcgtgccgatgcaaaaataaaggagtgatgacatgccaaagcaaattgatacgattctcatcaacatcggtcagcttttgacgatggaaagcagcggtccgcgggcaggcaaaagcatgcaggatcttcatgtgatcgaagacgctgttgtcggcatccatgaacagaaaattgtgttcgccggacaaaaaggggctgaagccggttacgaggcagacgaaatcattgactgttcgggacgccttgtaacgcccggcctcgttgatccgcacacccatcttgtatttggcggatctcgtgaaaaggagatgaaccttaagcttcagggcatttcatatttggatattctggcgcagggcggcgggattctgtctacagtcaaggataccagggcggcttcagaagaagagctgctgcaaaaagcccattttcatctgcaaagaatgctgtcctacggctcaaccacagcagaagtgaaaagcggctacggcttggaaaaagagacagagctcaaacagttgcgtgtcgcaaagaaactgcatgaaagccagcctgttgaccttgtttccacatttatgggagcccatgcgattcctcccgaatatcaaaacgatccagatgaatttctggatcaaatgctttcccttttgccggaaatcaaagagcaggagctcaccagctttgctgatatttttacagaaacaggcgtttttacagtcagccaatcccgccgttatttacaaaaagcagctgaggcaggcttcggattaaaaatacacgcagatgaaatcgatccgcttggaggcgctgaattagcaggtgagctaaaggccgtctcagccgaccatttggtaggtgcatcggacgaaggcataaagaaattggctgaggcaggaacgatcgccgtcctcttgccgggcacgacattttatcttggcaaaagcacatacgctagggctagagctatgattgatgaaggtgtatgtgtcagcttggcaacggattttaatcctggcagctcgccgactgaaaatatccagctgattatgtccattgccgcgcttcatctgaaaatgactgcagaagaaatttggcatgcggtcacagtcaatgccgcatacgccatagggaaaggagaggaagccggtcagctcaaagtcggccgctcagctgatctagtcatttggcaagcctcgaactatatgtatattccgtatcactacggggtcaatcatgtacatcaagtcatgaaaaacggaacaattgttgtcaacagggagggagccattcttggataagtacccttttctcagagaggccggatcttcgtttaaagaccgggatgtcacaaaaatgagcgacctgatcgcaacatgggacggccaggacattaagggaccggcgttgataggtgtccccctatcaaaatcctccatcagtcattcaggcgcttcctttgcacccggaacaatacgccaggctctgaaacattcatcagcctattctgctgagcttggagagcatgtcgtatcagagcttctatatgatctgggggatatcgatattcatgtcactgatatcgtaaagtcacatcatcacattttccaaaccatgcacgctctgctttcggaccatcccgattgggtgccgctcatacttgggggagataactctatcagctactccacaataaaagcgatagcacaaacaaaaggaacgacagcagtgattcaatttgatgcccatcacgatgttcgcaatacggaggacggggggccgacaaacggcacccccttccgccgccttttggatgaagagattattaaaggccaacatttgatccagctcggtatcagagaattcagcaacagccaggcctatgaagcatatgcaaaaaaacatagcgtgaacattcacacgatggacatgatccgggaaaaaggactgatcccaacgataaaagagattttgcctgccgttcaagatagaacagatttcatttttatatctgttgacatggatgtcttagaccagtcccatgcacccggctgtccagcgattggcccgggcggcctctatacagaagaattgcttgaagcagtcaagtatatcgcacaacagcccaatgttgccgggattgaaattgttgaagtcgatcctaccctcgattttcgagatatgacaagcagagctgcagctcatgttctgttacacgcattaaaaggaatgaaactctccccattcaagtgatcttctggcaggttgtattttgggtataagaaactcatctgcctaatgaatggcagctaaaaggagggcgagacagtgaatcttcaggagaacagcagccaacagctaaaacgcacaatgaaaagcaggcacctatttatgatctcattgggaggcgtcataggcacaggacttttcctcagtacgggctatacgctacatcaagccggacccggcggtacgatactcgcttatgtaatcggcgggttgatgatgtacctcgtcatgcaatgtctcggcgaattgtcggttgccatgccggtgaccggctcttttcaaaaatatgctacaacatttattggtccatctaccggttttatggtcggcatcatgtactggatcaattgggtggtgacggtaggctctgagtttaccgcatccggtattctcatgcagcgctggttccctgacagcagtgtatggatgtggagtgcgatttttgcagcccttctttttatatgcaacgcattttcagttaagttatttgcggaaactgaattttggttttccagcgtaaagattgtcaccattattttatttatcattctaggaggagccgccatgtttggcctgatctctttaaacggaacggcggatgctcctatgttgtcaaacttcacggaccatggcgggctgtttccgaatggctttcttgccgtttttatcgcgatgatatctgtgagttttgccttttctggtacagagttaatcggcgttacagcaggagaatcagcaaatcctcaaaaggatattccgcgatccatccgtaatgtcgcatggagaaccgtgatttttttcattggcgctgtcttcatattatccggattgatttcgtggaaggacgcaggcgtgattgaaagcccttttgtagccgtatttgcggagatcggaatcccttacgctgctgatattatgaatttcgtgatattaacagccttgctgtctgtcgccaactcaggcttatatgcttcgacccgtatgatgtggtcgttagcaaatgaaaacatgatcagctcccgttttaagaaagtgacctctaaaggcattcctttaaatgccttaatgatcagtatggctgtatcttgtttatctctcgtttccagtatcgtggcccctggaactgtctatgtggtgatggtcgcaattgctggatttgcaggagtcgtggtctggatgagcattgccttgtcccaactcttgtttcgaaagagatttctgaaaaaaggggggaatgtaaaagatctgacatttcgcacgccgctttaccctcttatgcctatagccgctcttttattatgctcagcttcttgtattggtcttgcttttgatcccaatcaaagaatcgcacttttctgtggagttccttgtatcatcctttgctatctgatctaccatttcaaaagaaatgtttcaaaagcgaaaaaaatcagccaagaggaatatccggccgatcacatcctgtaattaaaaaagcacaccccgctcaggatgggatgtgctttattttttattcagtaatcaacgtatgaatcagcttcggcgccttcgcttccgcggcgaggcggatgttgtcatagacttttgcgatgacttcatcgacgttttcgcggttggcgtaaagcgtcacgagcggttcgcctttttctactttgtcgccgacctttttgtggagcatgatgccgacggctaaatcgatctcatcttcttttgtggcgcgaccggcacctaacagcatcgccgcgacgccgatttcgtccgcaacgatttcagagacgacacccgcttctttggcaggcacatcaatttgatatgcggcttgcggaagcttagacggatcgtcaacaattgagctgtcgccgccttggtttttcaggaaatccttgaatttctcaagtgctttgccgtttttcatgacttcttccagcttcgctctcgcttcgtccaatgtatcggcttttttcgcaagcacaaccatctggctgccgagcgttaagacaagctcatgaagatcctcgggtccctcgcctttgagcgtgtcgatcgcttctttgacttcaagcgcatttccgatcgcaaagccgagcggctgggacatgtctgaaatgacagccattgtttgacggccgacgttatttccgatgcgtaccatcgctttggcaagttcagctgcgtcttcttctgttttcatgaaggcgcccgctcccgtttttacgtcaagcacgatggcgtccgccccggcagcgatttttttgctcataatcgagcttgcaatgagcggaatggaattgaccgttcccgttacatcacgaagcgcgtacagttttttatcagccggcgttaaattgccgctttggccgatgaccgcaaccttgtcgcggttcacaagtttaataaattcatccttcgtcagttccacgtggaagccgtcgattgcctctaacttatcaatcgtgccgcccgtatggccgaggccgcggccggacattttggcaaccggtacgtcaagagccgcaacaagcggagcgagaacgagtgttgtcgtgtcgccgacgccgccggtggagtgtttatccactttaattccttcaatggcagaaagatcaatcgtttcaccggagttcaccatagccatcgtcaagtccgcgcgttcacggtcactcatatcctggaagaaaatcgccatagcaagcgcgcttgcctgataatcaggaatgcttccgtctgtatagccgttcacgaaaaattgaatttcttcagtggtgagttcttttccgttttgttttttgatgatgatatctaccattctcatgtttggtcaccgatccttttcgattaagttcagtaaatcaagcccacaattgctgctgataaaaagctgacaagcgtagcaccgtataataatttcaagccgaaacgagcgacgacatttccttgcttttcattcagtccttttacggcaccggcaatgattccgattgaggagaagttcgcaaatgacacaaggaataccgatacgatcgctgttgtacggccgctgaaatggaaaccgttttgcgtaagcgacgtcatggcgacaaattcattcgataccatttttgttgccataatgcttccagcattaacagcttcattccatgggataccgacaagaaaagcgaatggagcaaacacatatccaagaatgccttggaacgaaataccgaatactgcattaaaaatgccattgatcaaggcaataatcgcgacaaatccaatcagcatcgcagcgacgacaaccgctactttgaaaccgtcaaggatgtattctccgagcacttcgaagaaggattgtttttcttcttcctcaacacgaagcatatcctcttcttttgcaacctcgtacggattaataatagaagcaattatgaaaccgccaaataagttcaagaccagcgctgttacaacatattccggtttcagcatggtcatatacgcgccgacaatcgacattgacacagttgacatcgcagatgcgcaaagcgtgtacaagcgctgctgatttaaaagaccgagttctttcttcaaggagataaatacttctgactgccctaaaatcgcagaagccactgcgttatacgattccaatcttcccataccgtttaccttgctgagggcaaggccgatatatctaatgataaacgggaggactttccacttttgcagaatcccgatcagagcggaaataaacacgattggcaagagaacattcataaagaatgtcgtttggtccgcattcaccaagccgccaaacacaaagttaattccctcagccgcgtattcaagcagataaccgaatccttttgcaaatcctcccacgagaaaattccctatcccggtattgaggagaatgtagccaagaataaattgcaaaatgagcataacaacaattgggcggatcttaattctttttttgccgctgctcgcgatccacgcgaggcctaaaaacacgattaaaccgataatcccaatcaaatacttcatatgtgtttctcctttatttgtattcgcttacaatcactgtttcctcagaaaacggaaagcagtctgccttccgtcagctcttaatagttgtctccgcctgatgcattttctccttttacgatagaaacgcctgcgctggcgccaattcggcttgctccggcctctaccattgtgtctacatcttctttcgttctgacgccgccagatgctttcacgccgatatcaggtcctactgttttgcgcattaaggcgatatcttccttcgttgcgccgcctgtagaaaagcctgttgatgtttttacgaaatccgctcccgcagacaccgctaaacggcatgcacgttctttttcttcatcagtcagaaggcacgtttcgataatgactttgacaagcgcttttccggctgcagcttccactacaccgcggatatcagcttccaccacatcgtcttccttgtcttttaaagcggcaatattaatgaccatatccacttcagtggcgccttttgaaatggcgtcttttgtttcgaatgcttttgtttcagttgtattggcaccgagcgggaagccgatgaccgtacaaacgtcgactccagttcccttaagctcttttgcagcaagctccacccatgtcggattgacacatactgaagcaaatttgtatgttttcgcttcttcaattagttttagaatgtccgctttttgtgtatgcggtttcaaagctgtatgatcaattatgttggctaatgacatccttcgcacacttccttttttgttaagatattttttagcataaccgacttttgaacatatgtaaattggtaattgaaattttgttcaacgaaaggtttgaacgtgtcacaaatcattaacaagcgccctcgcggtatgctggtcaatgattaaaacgttggcatattttccggttaatgctccgtgaatggaagatacttttctgcttccgccggcaactaaaatggagcgttccttcagcctgaggtcttcaagctcaacaccgatggtccggtcattgatggcgctgctgcaaatattccctttcgcatcaaaaaagcgtgaacaaatatcccccacggcctgttttttcagcagggctttctcttcttcgttaaaatatccgagtcggaacaacagcgcttcatcacggacagtccccaccgtgaagagagcaatattcgcctgctttcccatctcgatgatccgctcaatatgacggtctttctccaccattcgcttcacatccgcattatcaaacacgacgggaagcggaagatagcgcggcatcgtttgaaaagcctctgcaaacagctgaatcgtttcagccgaatacgtgtttacccgggaatggctgatgccgccttttagctggacgacctcgacgccttttacctgcttcggttgcatgttttgcgcgatttgatacatggtggttccccagctgacgccgacaatgtcgccgtcttttaccgtttcatgcatatattctgcaccatagcggcttaggtcatgtgtaattcctgcataatcgggtgtcggggaaaacacaacatgcgcctcaaggagcccgtatttctcttcaagtatggaaccgagcgcatccaaatcctcaaaagggtccatgacgcgaatctggacataccctttttcctttgcatattgcagcagccgggaaacggttggccttgaaatgttgagctgctcagcaatttgctgctgactgtagtcagactgatagtaaagccttgccgcttctatgcttaattgttgtttttcccgatccattccgcacctccctgtggatcagtcctgataaaactgcttttgatttgcttttattatacaggctggcgccggctttcatccacctgatttctaagaaactgaaaaacgctctgggcgcggacctgcccagagcttacttctcccaagtcatatgctgataaatgcctttcataatggcgtacattccatataggatcaggcctaatgccaatatagacagaatcaatttgccatgcggctgctgcgcgagttcggcgagcgcgccgtcaaagcctcttgtgtcgtcgggatcagcggtcatggctgtcttgatgagaaaatagccgatggctgagaaaataatggcgcgggcgatattgcctgcgcgcccggtgtttttcgtgatgcatatcatctgtttgttcatttttgatgtatcgaattctttcataaaagcagcccgaacgcctttcataaattgaacaatcgcaaatacgataaaacccgcacccgtaagccctgtgagccatcggccgaatggctgcgccaatacataagcggaccacgtctgttctgaagtgccgccgtccccttggccaaacacaaatcgcaaggcattccaagcgatggatgtgtaaacggcggcactgaaaaagtttcctattctccgtgacaggcctcgcctgctatttccgtgcccctccgtgtccttgatcgcacttaacaccatccagattacatagccgataaggccgatgcctattaaaaaaagcaatagtgacccatacggcatgcgtgatagcgtttggagagctccgctcgaatctttggcgcggcctgccccggcagccgtcataaaagccaaaaccccaagcagaataaaaacgccgccgaatgcaaaataaccaagcctcccgaatcgtttgatccaaggcttggtttcctgttttatttttgacatgtaccggtctttcaccgccatgtgtccaaccctctttcacagaaatctttactgtaacattcccgattggacaaagttgaaacagcttctgcctcagctatggctggctgagatatgtttttgctgtttagctgattgtgcaggtgtcatccaagcagccgctgcggcagctgtgactccgcctgctaatttcccaatgatcatggccgccgccatttcttttttcattccagccacaaaaccgaggtggctgccgagtacaaaagcgccgctgaccgcaaacgcgacattgatgacctttcctctcggcgtcatatcctttaatgaagccagcattgggatatggtgcgccaaagaggtcaccaagcctgcagttgctgtctcatctaaatgaaggcatttccccagagcctgtagcggttttttaaaggtttttgtaataaaagccgtcattggaaacgcccctgccaaggcaatggcgatggtccctgttgtttgtatccctgtctcgacattctccattcccggaatcagcacaataccggtcatcgtttcaacggagacagctgcaagcccgataatcgcaaccacactgaccgctttcccgaagagatgaaacaactgaatcatactgtcggtgtatcgccataacccaaaagcgatcacagcagataacagactcgggatcagaaggtttttacctatcatgccgatgtcaaagcctgcgcataatccgccgattaagcaaccgatcggcactgtgcacagcccgattaatatgcctttcgcaaaatacggatgatcctctttttcgatgatgccaagagcgacgggaatcgtgaagacgattgccggtcccatcattgttcctaaaaacacccatgaaaacagcccggcctgcggatctttcgccatttctccagccagcgcatatcctcccatatcaatcgccaaaatggtgttcgcaaaggaagaagggtccgcgccaatcgctgtgtaaaacggagcaacaatgggaatcaggattgctgccagcacgggcgccagcgacacaattccgatcatggacagcgccagcggccccatagccttaaagccgtccgcaaaccgctcgcctagcccccatctgtttcccaaacaataatccgccgctccccatagtaaaaaggcagccaaaatgaatacaaccgtgtcattcaccgtcatggttttctcctttttcaaacgtatgattggttttatcatatcatctgaaatcaccgaatagagttgatcttattcaatatgagctaaaaattcttttatatcggctttttcaacggctgttatgatgctccgcgctttttcttgcgggaccgttaatgtcaatttttctattatgtcttcttcagacagctcatttcctggcgccccttttgggcagtccacacgcgcttcgcaaatccggccgtctgataaataggcccggacaatcgtgaaacggccttttggaacggcatgaggagccggctgaatagcattgtcatatacgcgctgaattcgccccattgtcgtttgaaccccgcttgggatcggctggctgctgaaatgttcaacggtcaggccgtgtccatgcaaagcaagagcaatcacatattcaacgctgaaacggccttcctctccagtttttggagatctttccgtcaatgcagcatctccgcctggcggaaatatcacttcaatacgttcggtattggcagcagaaatggtttcttcggagataagctgtcgtaccgcatctgcagcatggtgtgccgcggaacaaaatggatagattttaaaccatagacccggctgcacaattctccacggtgccccccaatcgtttagcaaagtgtgttgtgctttctcaacgtcaccgtacagactgaagaaaccagtttctccatcaaatgccgtgcgggacccgccaaattctgattgggccagcttaacggccagcaagccagcctgagccgccaaaccggcgtgcagcggtttcatttctgttccaaattgcaccctcatcccagcagattgcgtagccgcaaaaccaattgctttttccagctcttcctgagtcagctcctcagcataacctacggcgcaggcagcagcgatggcaccaagcgttcctgtattatgccagcccttttcatagtggcggctgccaattgattctcccagccgtgccatcacttcaacaccaacaatataagcgccaagaagccgctcgtcatgtccgcgagcggcagatgcaataagggccggtacgatgactgcactggggtgtcctcttacatcggagtggacatcatcaaaatccaatgcatgggcgataaatccattgagcatcgcggattgtaatggcgcggcctttttgccctgtccgataataggaacaaggggcaggcctccttcatcctctatcagacggaggagcttttgaattcctttatcttctcttcctgcgaatgaagcggcagtaaaatcaagtaatcccttttttgcttcgtgaatcgcgtcaactgaatgctcaggttgtgacgttctcacagcctctgcaagacctgctgtcagcccttgtttgctcatttgatggtctccaatacaataaccgccagctccgcaaagtattgagaggcaaccgtaagggcttcttcatccagtgtaaaggccggatgatgccactcctccgtcccgttcgttcccatccagacaaaaaatcccggaatcttctcttgatacagagcgaagtcttctccgcccggagactgctcagcgtgaacggtttgatagccaagccgtgccgcagcttcggatgccgcattcaaaaatgtgccgtcattctgaacggaaggcaaataaggaaaccacttgaattctgcttgtgccccatagcccgctgcaattcctttagccactcgtctcatatgctcgggaacagcctgcctcgcttctttttgaaaggttcgaaccgtcccttccatttcagcttggtctggaatcacgttccacgacgtgcccgcctgtactcttgtgatactgacgactgcgttttgcagtgagctgatattgcggctgaccacagattgcagcccgctgatgatttgtccggctgcagcgattggatcaatactgttatttgggatgccggcgtgtccgcctttccctttgatgacgatctcaaaccggtcaacacttgccataagcggaccttcctttacaccaatggttccgacaggcagatccggcttattgtgcatgccgaaaatcgcggaaatgccatcaagtacaccagcttctatgacctttcttgctcctgcggcaatttcttcggccggctgaaagataaagcggactgtacctttcagctcggcctttctttgattcagcaacatcgctgtgccaataatagaagcagtatgaaaatcgtgtccacatgcatgcattgtgccatcaaccttagatgcaaatgggagattcgtctgttcttggatcgggagcgcgtcaatgtccgctcgtattgctatcacggggccgtcttcccgtcctttgatttctgcaatcacaccagtctccaattgaggaacatcaagtatttcgatttgctcctcctcaagccagcggcggatttttttcgtcgtttcaatctcttgaaatgacagttcaggatgttcatgaagatcacgccgcatattgattaaacgggtatgaaacgttttgtcggccattgttcttctctccttcttatataagctctgcaggctctcccacctgcttgataaatcgtttcgtccgttcgtttttcggatggtcaaacaattcctctggcgttccctgctcgataatatggccgtctgccataaaaatcactttatcagcaacctcttttgcaaacgccatttcgtgtgtaacaatgatcatcgttgtttgtttttccgcaatggacttgatgacctgaagcacccctgtgacgagctcagggtcaagcgctgacgttggttcatccagcaaaatcgcatgcggattgaccgcaagcgcccgcgcgatgccgattcgctgctgctggccgccggacattgtgatcggatagctatcagccttatgctccagaccgacttgtttcagaatctccattccaatacgtttcgcttcgtcgcgtggtttatgttgagccacgattaaagcttctgtaatgttttgcagagccgttttatttttaaacagattgtagttttgaaagaccatggccgtttgctggcgaagccgatatgcttccttgcgtgtaaacttttccgcgttcagtttggcttctccgatttcaataagtccttgatccggacgctctaataaatttaagcaccggagaagcgttgactttccggaaccggacggaccgatgattgccaccacttctccgcgtttcacttctagatcgattccgtcgagcacgacgagatctttaaacgctttgcgaatattttttactgttatcaactgatttcacctctaagtccggtatggcttgctcatggcacgttcaaacaagtcctgcaacatgctgtagatcatggtaagaacccaatagacgatcgcaaccgccaagtacgtctcaaaatatttgaggtttcctgaagcgtacatcttcccttgggcgaacatctccatgacccctaatgtaaaggccagtgacgtttctttcaggagcccgataaatgtattgcccgttgccggaatcgcatttcggatcgcttgcggcaaaataatccgtctgtatgcctgaaattttgtcataccgacagacaggcacgcctccagttgcccgtcatcaacagaattgagggcagcccggaagatttctgccaaatatgctgcattttttaagcttaacccgatgatagcggctgtgagagctgtcattttgctcatctctggaaatagctgcggcagcccgtaatagattaagaacagctgcaccagtgtcggtacgcctcggaaaaaggatatatacagctttgacagctgatgaagcactggaattttgttctttgtaatgagtgcgagaataagtcctccgataatggcaaaaatcatagctgctatggccataaacaacgtgatcggaagggcctgaattaaagtcgggaacgctgatatcatgaattcccaatcaatcgtgttcattctggtgagtcaccgccgtttcttaatgcttctgttctactgtgatatcttcattaaagtatttttcagagagttttttcagtgttccgtctttacgcaattcatctagcgccttattgacttttttgcggagcttgtcgtgcgcatcgtccttggcaaatgggaatgcaacctgttcgtaaacaatcggatctcctgcaagctttaatggcaaaccggtcttcttgatttgcgcgatcaatacagttcggctgttgacataagcgtctacacggccgtacgcaacatccttcagcgtaccctcttgtgtttcgtacgttttgatattgatttttttatcaggatctttgctttcaaggtttttcgcgtggtttgaaccgagaacggctgcgactgtcttgccttttaaatcgtctactgatttgatgtctgtattgtcttttttgacgacaatctgtgttcccgcataagcgtatggtttcgtaaagttatacgtttccttacgttcgtctgtcacagctacctggttagaaatggtgtcaagcttgcctgtttgaagctcccccatcagcccgctgaattcaagcagcttccagtccagtttcatgtcaattttcttagcgaccgcttccatcacttccacgtcaaaacctgtcagctttccgttttctttataagcaaatgggtaactttgtcctgtcgcaccgacatgaagcacattgtcatcctctttactgctgctgtttccattgccgcaagctgagagcaccgctaataatgcagcaacgaccagcacaatccattttttcattttcatttgattttcccgccttttctttttttatagatcatgtcgcaattgttttttcatatagactgtgatatgcccttttccaaggtcttgttcacctgagcggacatacccttttcgttcgtacatctctatcagccacggatgcttatccgctgttccgagtgagacaaacggaacctttaacgtatcgcgaaggattgtttcctccagccattgaagcagctttgttccgattccttttttaccggtgtcggggtccacagcgaaccaccagatatgcggaacgccatacggtcccggctgttttccccaaggcattctcaaggtgatggtcgcgatgatccgcccgtcttcttccatgacgtagcaagcgtttttccgaatattttgcagcaccaaatctaaatccgcatgagcagcagcaaaacgaatgccaagctttcgaatcggttcataagcccgcaatgtcagcgcgaggagctgttcagcatcacgttcaactgcaaggcgatattgtggcttcatctagcgttcctccttactttgcatagcggtttaccggcttttccaaaccgaagtgctctcgtaatgttgtgccttcatattcttttctgaacacgccgcgctcctgtaaaatcggaactacttgatcaacaaacacttcaattccttctggaagaagcggaggcatgatgttaaacccgtcacacgctttcttatccacccattcctgcatcttgtcggcgagctgctccggcgtgccgacgaagatatggtggcctctggagcctgcaacgtatttgtaaagctctcgtatcgtcatattgtccctttcagccatttcctgaacaagcttgaagcggctcttcaccgcattagaagcttctgcgtcaagcttcggcagcggcccatcaagcggatatgccgacaaatcaattccgcctaagtaattttggagaatttgcagaccgacagatgggataatcagatcttgaagctccttgtatttggcttgcgctgcttcttctgtatcggcaatgattgggaaaatacccggcatgatggcaattttttctggatcacgtccgaattccgctgcctgttctttaatggattgataaaattcctgagctgattccaggtggttttgtgctgtgaagatcacttctgctgttctggcagccaacgcttttccgtctcctgatgatcctgcctggataatgaccggctggccctgcggcgttcttgaaacgttcagaggtccgcgaaccgagaaatattctcctttgtggttcagctcgtgcattttttctttgtcaaagaattcacccgtttctttattacggataaaggcgtcctcttcccatgaatcccaaagcccctttacaacttcgacaaattcctctgcccgctgataacgcaaatggtgttcaaggtgcttttcaccgctgaaattcagcgctgttgattcaatagatgaagtgacgacgttccatccggcacggccgttggacagatgatccaatgacgcaaactgtctggcaatatggaatggctcgctgtatgtagtggaggctgttgctgtcagtccgatttttgatgtgacctgcgccaaagcagagagcagggtgaatggctcaaaccttgttaatacatttggatgtgatttgctgtcaattgaaaggctgtccgctaaaaacagcatatccagcttgccccgctccgctgttttcgcaagctctttaaaataatccaaattcatgctcgcatctgagggcgcgtccgggtgccgccaagacgcaacatgatgacctgtacctgctaaaaatacccctaatttgatttgtttctttttgcttgtcatgacgatactccttttatcatgtttttaggctgaataatccgaaaaataaactcctatattcctagtcgtttaatatgaataaatcaaaatgtacctttgtcttggacgtttgtcaatgagttaagattaattttttctattcaagcgaaaagacccttgcgtgaccatgagggaacggcattgattcattcaactagtgcaacctctatatcggcaagaaaactgagtctaatgaagcaaagactcagttttcacccaagaattttatataagatttcgccatttcctttgccttttcttcgcttttgcaaaccgcctatccattcagacgccgtaacgattgtataaaaaaacagctgactccagatattcaaacgggaatcagctgattgatgtgaattaattaagctcatgaatactttcttctgctttagcagaaaactctttaggctcaaggcggtctaggtcttcatgaaataaactcactttttggatttgccgattgtcatagtggtggaaatagtagtttccagtttcgttgcacatcacggaagtatattgcgtataatgaatttcgtcttcttccgttatcactgcgccctttggtatcgtcatatttgccaaaatttgaaaagcggctgttacacctttcgtttcatcggccgccggctctagatgttctttcaaataaacagctctgacaaaccgggaaggcggtgtataatcccccggcagaccaacagttcctaagccttggccaaaagcagaaagggctaatccgcccatctctttgctctctaattgcttcggtctgattcctgtatattgctgcagattggttacatgccatataaagtcggggctgttcgtcatgacaccaggttgattatcatagactttgaggccgtctgctcttggttctatcgtcaggcttcggcccgtccggtctgacaatatccagtgaagcggtaaaactgtatccaatagatctaattttttctctacaatcgttaaagatcgaatcttttcttttacgtcttccaaagactgacagactgacagcacccatgtcacaaactcatgcgggacaatgtgaacggtatcttcccgtatcgttttttcgtactccgcatagcccggaaaataaagcgccgcacaagataaaccgctttcattaacgccgtcggcaaataatatatttccaagttttctccccataccgataaacgcgtactgtgtctgatgggcctttccgtcagcttcactcttccagctgtaacggcgcggatagagaatgacctccgtccccagctgaaatgcaaaatccattgttctcgctaataaatgattccggtcagcagtttccaatgtaagacttgtgcacatttgatcagtccccttttcaattcagattaatatcatacatattgtgaacgaattggttttatcagcataacgaaagtcaaatcgattcgtcaaagaattgacattacatcaaataaaacgaaaaaatccagccttctaagaggctggattttttattatttagccaaaacaagctcgtgaatcgcatgtgcaacgccatgttcattattggagcgcgtttgaaagtttgcggcttccaatacttctgggatggcgtttgccatggcaaccccgcagcccgcccattcgatcattgtcaggtcgttcccgttgtcgcctatgcacatgacttccgcctgttcaattccaagcagctgtgccagctggcgtacagcatttcctttgctggcttccgagtgcagaatttcataaaagaaaggcgcacttctgaccattgtatatttttctctcacttctttcggaatcgatgtaatgacgcggcttaagttctccggtttatcaataaacatcactttcgggatgaggatatcttttggcacctcgtcaattttgcggaaatgaagcggcacctgtgtcacataggattcgtatacggtaaattcgctaatgtcccggttaggcgtatacaaattagatgagtcaaagaaatgcatcggcgtcttcagctctaagctcaggtcatataatgaagccaaatcatcataaccgagagacagctctgagaccacttcatttgtatgcgtattttgaacaagtgctccattatacgcaataacatagtcgccttcttcaattaaattcagttcatctaaatatctctgcacacccccgataggccggccggtgcaaagcacaattttgacaccttccgcttttgccgcgtgaagggcgtcgcggacctcctctgttacttcatgatgatcatttaaaagtgttccatccatatcaattgcaattagtttgtacatcctgcatctccttcatgtcgttttcaggctatagtcccatcatatcgttttttctttttgatattcaaccggaagagatggttttctccggattctgtttagacgccgcccttgtcttcggatacgcaagcgcggtttccgctttctttctgccttgacgccgttttctgcttttttctgtttcatcagcagaaagccggcagctagaaaaggaatgccggttatattcaagatggcaagcttcacacccgccgcgatgaaaaagaacccccatgaagatgatggattccgtctgatcatgacgtaagccgccatttccagaacgatcaggatggcatgaagcactatgccataaatcagcaatacaagggcaaaaaacaaaacataattcacgattgcccctgagtacatcatagcgcgcatcatttgtataaacgataaggactgcatggagccgctgatgacattagggttatagatcgtatagtcactaaataaatgtttgactttgagaaaagcccataatataaatatccattgaatgatatgtaaaacaagccccgctgccaccagtctttcagctttttgatttctcatctttctcctccctgccggtctttgattcgattcttgtcatcgtttttctctgtccattttgctcccatatcaatgtcccgttttctcctcttttcagcgtgcttttgagcggataataggggccgaggtactgaatctcgatagacccgtcagtgctttgggaaatcaccttgtatgccataaaaggcagctgtacctctcctcttccttcaatcacttccgtttccacaacctcgtcttcggtaaatgtgactgttgctgatttcacaccgtccgttggcccgggggcacgcccctcatcccacgttccgtaataaaacggcgtctcttctttttgctgctggcagcccgataccatgatgcatacagcaattaaaaacaaaatgccatatttgtttctcaaggggatcaccattctttcctccttttttgggcgaatgccgtgccactgtgccaatgactacataagttataaggaattcacccacaaggagactgatcacatgaacccttatcaatattacagccctcagctgcctcagcaggaaccttactatagccactatgagtacaatccttatccgcagcaggatgtatacgatccataccaaatggacagacagccggcattggaaagaagaatcgcagcacttgaacggcaaaatgaacagcagtcaagagaattaacccgtctgacaaacgaagaccgccgtcaaaatcgggaaattgcacggattgccgaacaggtcaatcagttaagccaggctgttgaacgccatacacgccgcctaaatcggctcaatcagcgcctccgtacagtagaaaaccggctgaatatcccatttactgcaggggaaggcggtttctgagcgaaacaaagaaaaaaagcggaatacgattctcccatctcagggtttcgttttccgcatttcttatatgttaaaacggaacatttacataaaaagggtttgtacccagtatacaatctttaccgttttcattcaaagatagaggggctgaggaaaataattgtagttcctctttgacggaatttcttttcattcaagttgcatgataataccgactcacgtcaatcgatacatggagggatcattcatgcataatacacaacacggcttgcagcagctgaaccaatgccgccaaactgctcagcagctcattcagcaaacacagcaaagcagccagcaatatcgccaaatgcttcatcaggaacagcaaaacatccaaatgctgcagcagattctaaaccacgaacaacaagctgcacataccattcagcaagcactgcacgggcatgatatggcgattcaaaagtgccagcaggttgtcaacatgtgcaaccaaatgcaacaggaacttactggacaatccagcgtcatgaatacgaatgtgtctacacttccattcggccaaaacacgccatttcagcagcaatcctatcagcagtaacatataaaaagctcaacacaatgcgagtgttgagctttttttcttactgttctttgcgaatatgtatatcctgaatagactgtttcggtgcatgaaatctgctctcggcttcacttcttgcctcggcaaaagcccgcgcctccacatgatctttgtagacatccagctgaatcaaatacagcgggcgcactttaaatccatgaataatggtcaccgcccataacgggaccacaataaaaacaccgggcagatcgggcaaaacaaaaccaaacgcaaaaatgaaaaaataaatgatgccgtacatgatccactttctatttctaaccttgatgccaataaataaaaaggcaaaaaaactggtaatggcaaaaggcatgaaaataaacagcatccaccagctatgcagccattcccaagcggaacctctttttgtaattcccatatttttctcctcctatttacctataataatcgattaggcataccgcgtcacccataaacgggaaaaactttctcccttaaaaatagtgatagacggggaacaggtttcttgctatattattaattgataatgataatcattactaatctattgagatacatagtgggagggttcttgatgaaaaagaacatattgctcgtgggcatgcttgtgctgcttctcatgtttgtcagcgcttgcagcggcacggcttctaaagggagctcaagcgattctgcttccgaaaaaacagaagtgagaacatacaaatcaccaaaagggaacgtcaacattcctgcacatccgaaacgcatcgtcactgatttttatgccggtgaattgctgtctgtcggggccaatgtggtcggctcaggctcatggtcatttgataatccgtttttaaaatcaaagctgaaaaatgtgaaggatgttggtgatccaataagcgttgaaaaagtgatggagcttcagcctgacttaattgttgtcatgaatgaagagaatgttgataaattaaagaaaatcgctccgactgttgtcataccttataacacagcgaaaaacgtagaagatacagtcagcatgttcggagatatcgccggatcgaaagacaaagcaaaatcctttatggctgactttaacaaaaaagcggaagcagctaaaaagaaaattgccggcgtcattgacaaagatgcgaccttcggcatttatgaaaacacagacaagggcgaattctgggtgttcaatgacaatggcggacgcggcggccaagctgtatacaatgcacttgggttaaaagcgcctgaaaaaattgagcaagatgtcatcaaaaatggagagatgaaacagctctctcaagaggttattcctgagtatgccgcagattatatgttcattacggattacaacccgaaaggcgaaagcaaaacactcgacaagctggagaattcctctatttggaaaaaccttgatgctgttaaacataatcgcgtgtttatcaatgactttgacacgttctacccgtacgacccgatttctgtcagcaaacaggtggatatcatcaccgacatgctgatcaaacgggccgaagaaaataaaaaataaaaaaacggcacagtcatgacgctgtgccgttttttatgattcactttaattttgattgtacggagtccggcatatcttcaaacttgacttcttcccaagtctcgacatactttcctttcgccttcaccttcaaatacgcgttcttccgaagctctttgccggcgaaaaaggtcacttcttctttttttccggatgcattatatccgtctaatgtatattcagtaccgcccggactaagatgtctgccatctcgatcaatctgaacatagacatcttgctggtgaataaacggattaaatctgtctgtaacatcgttatgaaaaaagagaagcccgcatattacggcagcagccgccaagacggccaggattgccattgcttttttcatctttgcactccccttacttgttcatttttttcaaatagcttgaccgcaccgcgaggaagaatagaagctgaaaaatgaaaaaccctccgatggtgagactgagcggccccgcgacatcagaatagccttccacagccaatgttctcaaggcaaacagtgtatgcatgacggcaatgacaaatggaaagaagaaaagaatggccaattgtattgtcacgctttgtgccatttctcgctcactcagaccgattttggccagtgaacggtagcgctcccggtcttcatctaaatcagtgaacagcctgaaatataagaaacttgctgccgcgacaaagaatacaattgcgataaacaggccgataaataaactcaggctcggcagctgcaccgtatcatagtaagtcccggcttttgaagcaaaatcagaatgcacgtcgatataattgccgtaaatctcattttgcaaggattggctgatctcaagactgtctttccaatgatcatagctgtagccgtataatgacgcttgatcaccgagtgatttcagctgatcaaaggtttgatcattcaccgcgatgatagcattcaatgagatcagcggttttttgacttcttttaccgacagtttttgatcagacagctcccctttttggttcagcagcttcagctgatccggcgcttcgtttttgaaattgcggtcatacgttcccgggaaatagacagcctcgtcttctttcaggccgttcactttgacatggaagtattttgccgcatccgattcactgatcatgtaaacagggggaacagtttctccttcctgatagcgaacataggaaacatctattttgtctttcttatacgtaaagccgtgtgttttcagttcatggtcaatatctttcaaatgagtctgttcttttggattgttgctgtaagataaatactccatttcataagcggactcttccgctccgacggtcgatttgtacattgcgagcacgcctgtcgcagtaaacgcaaccgcggaaataatgctgacaataaagaacaggcgggcgttgtcttttagacgatagacaaggtcagaaacccaaatgatgtttttcccgcgcagataaaaggttttccacttcttcagcgcgcgcagaatccatatgctgctttggctgaaaaagaaatatgttccgataacggtgagcagtaaaatgataaacggttcggccccgtggacattgcctttaagaaccatgccgtacccgccgcacagacaggcgatgccgaataaggacagaagcacggacggcttaggctccggtttaaccttgccagtgccctttattaatttgataaccgtatttgatctgacaaaaaggatcgtaaactgcgataaaaagaaaaataagagcagaaatccgcaggccgtaataccgagcgctttccaaggcatatacaaaggcagcgcgtccatttctaaaatataagcgccgaccgtaaagaacgtctttgaaaaaatgaatccaccgattatgccggctgcaattgacatgacgccgatgatcatattttccgcagtaatgagctttctcagctgccccggcgtgatgccctgcatgagcagaatgccgaattctttatttctcgatttcaaaaatgcattaaccgaatacagaacaaataagaaagaaaaaacaaagatcatccattccgcggcggttaagccttttttggcgatgttattcaggtagccttcctttaatgccggatgaaacaggaacatcgcaaaggtaaagaaaatcaaaacggaaaaggcgctgcttaaaaagaatgcaagataagcccttttgtttctcgtgacgtttttataagcgaactgaagaaaggtcatttgcgtttccccccagcatagacagcacatcaagaatttgttcataaaagacttggcggttttccccgcggtaaatctcattaaacaattcgccgtcttttataaagatgacgcggcggcagtagcttgccgaaaccggatcgtgggtcaccatcaaagccgtgacatgatcatcccgattcaggctctgcaacgtttccatgacgtcttttgtcgctttggaatcaaggtttccagttggttcatcggccagaatgagtgacggcttatgaatgaccgctcttgcgatggcggcccgctggcgctggcctccggatacttcaaacgtccgcttgttaagcaggttttcgataccgagctttgccgcgatgccgtgcagtttttcttccatgacagacggcgcttctttttcaagcgttaacggcagcatgatattttcaccgatcgtcagcgtgtctagaaggttgaaatcctgaaacacaaatccgagctgcttgcggcggaaatgagcgagctttgtccgcttcaggcgatgcgggttttctccgttaatcaggatatcgcctgaatctggacggtcaatcgttgaaatgatattcaaaagcgttgtttttccggacccggacggccccatcaccgccgtgaactcgccttcttctattgaaaatgaaatttgctttaaggcctgataggacacttgtcctttataggttttatttatatgtttgacttcaagcatattcgccatgaaaatcctccttatggttttattcttgttgatctgggctgctttcatgtagtgccgggacgttcaacataaaaatccccttgacataaatccatgttatcaaggggaaacaaagcgggctatgttgttttcttaacgcagccttacatttttgtaagaaatgaaaatcgaactgatgtcccttcaccgggagacgagctgatgtccaccgtatgattgagcttatctgtaatttctttgacgagatggaggccgattcccgtagattcttggaaacgccgcccgttttcacccgtgtaataagggtcaaacacccgcttgatgtcttgtgagggaatcccgacaccgtaatctttgacttcaagcaccgtcctgtcttcatcgcggaagacattcagctcaagtctgtcactcttgcccgctgaatacttgaccgcatttgtgaccacttggccgatcgcaaatttgagccatttggcatcggtgtaaatctgatgatcatcgcaaacgttcattttcggataaacgcgatattgaataaaaaatcgtttatagctttgaatgactgattggagaagctcggacagggaaaccgcttcgattttaaaatcccgttcaaacaggtcgagccttgaagaataaagaagcgtctccagcccgaattcaatctgccggacttcttttttgatttgttcaaaaacgggctcatcctcttcttgaatgattaaattaatgaccgacagcggcgtcttcacttggtgcacccattgattcatatacgtcacccgcgcgtcaagcttggcttcggtctcatggagcttctggtgctgcagccggatcagctccatctgcttttcatacagctctgaacagaacactgaagaaccgagatacgggatatccgtcccttcctgccccgagctgagccaatgatacacgccgcggtctttgtaccagcgataggcaagatagcccgccaaaataagaagctgcacgcccaatatgtaaaacaagtgagaaaaagaatgcagacccgcaaaccagtaataaaagaagacaaacagcccttgaaggagaaaaagcagaatcagcactgcatgagaccggagaaacagcttcatgactgcgccctcagctggtagccttcgccccgcaccgcttcaatagaaacaggcgcattcagctcccgcagtttttttctgagccgcgtgatatacacgttaagtgtattatcatcgatgaatatgtcggtgtcccacgtcttttccatgagacggtcccgactcgtcaccttttctccccgctcaagcagcacttccaaaagcttgctttcttttttagaaagctcgcttttttcatcctgaaaacgcagttcaaaccgttccacaaagagctgaacgccggcatattcaaccactttctctccctgctttgcggcgtactccccgtacgccctccggatctggcttttgattttcgcaagcacaatatcataagaaaacggtttttcgatataatcgtctcccccattttcaatcgccatcacctgatccatttccccgcttctggcagaaataaagatgatcgggcttgtggagtgctggcggatctgccggcaccaataatatccgtcatatgccggcaaattgatatcaagcagcaccacatcgggcttttcccgcaaaaagacatcaagaacagctgtaaaatccgcggcgaccactgtttgatatccgtatttttcaaggtaattctgcaatagtccgcgaatgtcttcactgtcttccacaatcataattttattcaaactgaaccactcccgtttcttacactgctgccatcatcataatcgttttgggcgtatggacgcaacaccgcacaaaaaaaccgccatctcggcggtttctgatctctttagccgacctgctgcttagctgctttaccggctgatccgaactctctcattttgcttcgcactgtctcttccacggcttcaatgccgggtgtcaaatagccgcgcggttcgtacagatcgctgttttcctgaaacatgcggcgtgtttcgtctgtccacgctaccatacattccgtattgatattgatcttcgcgtggccgagtgtgatggcttttttgatctgatcctgcggaatcccggatgccccatgaagaacgaggggaatatcagtcatgcgagagatagcctccatttccttaaatccgagattcggctcaccctgatatttgccgtgtacagagccgagggcggcggccagcgcgtcgatattggtttctttgacgatccgctcacattccgcgatatcggcatagcggaccccgccgaccaggccgtcttccattccaccgaccgtgccgacttcggcttctactgacacgccgtgttttgcggcataatcggtgacttcttttgtcatcgcgatattctcgtcaatcggctgatgggagccgtcaatcatcactgagctgaatccggcatcaatggcctgtctacagcgttccgcactgctgccgtgatcgagatgaagcacgaccggaacggtaatcgccatgtcctccattaacgcgccgaccatggcggcaatcgttttaaatccgcctaaatagtcgaccaggcgatcggaagccgcggcgatgaccggtgattgctccttttgcgccgcctgcaaaatcgccttcgtccactgcaggccgttgatattaaactggccgatcgcatactgctcccgctttgcatcttcaagaagctctttcatcgatacaaaagccatgtccacccctcctttatccattacatgttgaagtattttgatacgacgtccactgttgtttttttcgctgtttgaatggcttcctcagcagtcagcttatagtattcaggccggaatagctcaaccgatacaacatcagagaagccgatttccttcagtgctgataagtgggcatctaagtcaattgccccttgtcccggccatacacgatcctcatctgttaaaaagccgattgggaaatcttctgtatcatcgatatgatagatgaagattttctttccgtccgcctgctttaagctctcaatatttgaacccattgcatggaagtgaaaactatcaaggacaagcccgacattgtcacggttaactgtgtttacgatctcatacgcctgttcaaacgtattgaccgtacattgcggatggccgacaaattcaagcgcgatttttacgccgtacggctccgcgatatctgacagctcagtcagcacctctacactgctctttttgatctcttcttttacaatcttctgctctgtcacaagcggaacggccaccacatatttcacaccgagggttttgcatgtttccatcatgcctttaaattcagtgatgatctcgttgtggcccttttcatcacggttgttgaagaaaacaagcgcgtttagggcaagcggtttgatgtgatgggtttgaaaatattccgcaagatctgccaatgaatgatcttttaagtactcgggcagcttatccattgtgcggatttcaatataatcatagccgtgcttttcgcatagttctaaatcctgtttaaggtttgagttttccaatgttgtcgcttcattaaaacaaagtttcatgccagactcccccatctgcgttttagatatgaagggagttcggcaggaaggctgtcgccatatcccgccgaactccatgctcagcttatgccagacctaattcttctttcattttcttaagcataaatcggcttgattcatccgctctttcatcgacccaagcaaatacggcattcgtcgcaattccgtcgaacttcatctctctcagttttctgaaaatcgtatcaaaatcaacctcgccttggccaatgtccaaatgctggtgaaccgttactttcgcgtcaggcggattgacgatgtagcgaaggccatgagccgctttatgattataggtatctgcaaataaaacatgtgtgaggcggtcgccggcttcgtcaaacatggtctcgatgtcgcctttgccgtcatcatagaagaacgtatgcgcagtcgagtagacaagattgatccaatccttgtcaagcgcgcggatcatatccatcgcacctttgtgcgtttcgataaaatcgtatgggtgggcttgaagattaagtttaataccttctttttcaaagactggcagaagctcatccatggatttgataaatttttcttcacttgttaaaggatcatattttgaaccgctgaattcgctgttcatcaaatccacttcaagttcaaccgcaatttcgattgcccgtttccaattgcgcaccgctgcctgccggcggtcttcatcaggacccgcccagtggtaaagaggaagaagcgatgaaagcttaacacctgtatctcttaaaaggcgctttaattgtttgatctttgctgaatcaactttcggatatttataaaacggacaaaaatcctcacgcggagacaattcgatatattcatagccaagctccgccgttttatagaccgtttcctctaaagttaaatcatcacgatacatggatggatccaatgctaacttcatattttcactcctctgttttttagttttgaactgttgtaaaagattgatagaattccggtttttccttcaattcaaccttttctttttgtccagattcctgggcttttacacacgcgtcagtcgtgacagcagcaatatagccgtcccatgccgtcggtccgctgacctcgcctttcttttgaatcgaatcaataaagtcttggatttccacatcatacgcagcgacaaagcgtctctgccaatccatcaaaatatcagtactgaatctgccttcttttctcaagctgatgcttgatggctcgggaagcttgatgatgccgtcttctccgacgatttcgcattgaatgtcatagccgtatttacagttcacatagatttcagcattgatgacgataccgccttttgtttcaattacgacgatttgcggatcttttaaatgcggcagcgcgtttttcgattttttcgggtagatgacttgaacggactcgtagtcatcgttgacgagccagtgcagcacatcaatttcatgaacaagcgtgtcgactacggccatatcggttgtgtagttatctcctacagtcgggttgcggtgcgcgcagtgaatcataagcggttcgccaatcacatggttatcgagtgcttccttcagctgtacgtaaccgctatcataacggcgcatgaagccgacttgaacaaggcgtttgcccactttgatttcttcttcgacgattcgcatgcatccttcagccgttgtcgcgagcggtttttcacagaacacatatttctgggctttaatggctttcagcacgcttgactcatgcgcaggcccccagcttgtcactaaaacagcgtctacattttcgtctgcaagcaagctgtcatcattcggataaaccgtcgcgtttaattggtattgctcaacgaccttttgtgcagcttcttgattaacatccgttacagctacaatttccgcgccggacagcttgttcgtgatgcggttaatatgttcttttccgattgctccagttccaattacgccaatacgtaaactcattgacagccactccttctgttgattacataattttgctttctgtttcttgctttacttggctctgaggagatccgtagagttcctcttgaatttgttcaagcgacttgccagacgtattcggcgcaaagagcagcccgatgatcatactggccgtcacacatccgagaagaattgcagccatcgttccaatgccgaaattggtgataatcattgggacaaacagactccaaatccctattgaaatacggacaaggaaaaacatcagcccttgtgcggaagcacgatattgcgtaggaaagatttcactggcccataactgatagttcgcttgctgccctgctccgttattgatgccgatcacgacaataaacaggagcagaatcggcaggccttcaattggcagcagaaacagtgtccacccgatcaccgccatgaaagcggcgattccaaatacggtttttctatatttgtcggcaaagggcatgaagatcaaggcgacccccaatcctgtgaagataaacagccccatttgcaaaaggttggccatgttggcagatacaccgccgacctgctgataaatgtatggcataaagaagcccatgaccccggcagctaagttccaaaccaagtacacacccatcaaaaacaatatgctttttagatacataggcttgagcaaatcaaaatacgatgtcttattcagtacagccggcttctctgcctgagcatcctccggctgattttttgtctgccaggcgtctgattccggaagcctgattctcaggatgtacgtaatcagcgcaatcacaagcagatgggcaaatacgattttattccccaagagtcccaagtcaccggccagtacggagagaagcagtacaacgacagcgcccgcggcccaagcgacttgtgctacgccgcaatgcctggcccgattcttctttggcgcattttccgcaataatggtccatgacgcggttatatcagctcctactgataaaccgataatgatgtaaccgcttaacaacatggggaaattaaccccgaacaaaaccaaacaaatccctagtgcataaaccagcatactattggtataaacagccttccgtccgactttatcagccagaaacccgccaagcagcgcgccgacagcggcagaaatcgcattcgcgctcagcgcgccgagcagcccgatttgcgtatcggatagcttaaggtaactgacccataatgataaaccggcggagcctgccacaattgaaccggcatcaatatagttggccaatgctgccgcgattgtccgtttattgaaggctgaatctccattggtattgcccatatgttcattccccattaagccagatccaacaactgctgatcaatatagtttctcgcaatcaatgcatactccagcgggtttgcaacatcggggtcctgttcagcttcaatgacaatccatccggaataactgtgcttcaacagcagctgatatacttctctaaagtcaatgcagccgtcaccgggaaccgtaaacatgccttttaaaaatgattgccggaacgattgtccttcgagcctgcattgttccatgacattcaggcgggcatccttaaagtgcacatgcttaatgcggccgatatgcttctcaagcatccccatgtaatcgccgtcagaaatatacgcatggcctgtatcatagaggaggtgtacatgcgcagggtctgttcctgccatcaggcggtccacttcttccgctgtttggacaccagtgccgagatgatgatgatagacaagcttcaagccatgctgagcggcaatttcgccaaggtgattcagcccttcgcaaagccgctcccattcatcatccgtaaagtgcggcttctctgtgaacacatttttctccaagccttgcacgctgtacgtttgttcagagacaactgcgacatccgcgtttacttgctgcaaatactcacaatgcagggtaaatgtctttgccgcttcaccaagtccgtcacgcaaaataaaactgctgaaccattttcctgcaatgcgtaagttccgaagcttcagctctttgttcaggacggcaggttcggggaaaaagcccccgacttccgtgccttgaaaacgtgcgacaacgatatcacttaacaaatgctgaagtgtatttcccgctccaatttcaggcatgtcatcattccgccacccaatgggagcgattccccacaggatttcatttttgcccatcttggtgcctcccctctaatactgcttcgcagattccagctttttctcttttgcttcgtatgccttctgaacgctttcttgttcagatacctctgccaccccgacatgccaccagctgtcatagccgtccgtcattgttttaggcagaaccttcatttcaattaatgttgatacatcctgtttcttcgcatcctctaacgccgcttttaattcttctactgtgtttgcacggtaggttttcgcgccgtatccctcagcgactttcgcgtaatcgacattcaggatttggttgtcatctgtgcggaactcgcaatagtagctgccgctgccgtgatccatttgcaggttgttgatgcatccgaatcctgagttgtcaaagagcagcacattgattttcttgttgtattgaatcgccgtgatcaattcagaatgaagcatcaggaagctgccgtctccgacgattgaatacacttctctgtcagggtgggccagtttaagaccgagtgtcccggacacttcatagcccatgcaagaatacccatactccaggtgatacgtattcggaacattagaatgccacagacgctgcaaatctcctgggagtgagcccgctgaacagatgatgacgctgtcttcaggaatcgtctcgttgattgtcagcaatgccgttgtttgcggaagctccgtattcaacgcgtcagcatattcattcaggacctcttgagaaaaatgatttttgatttccggatcaaatgcttcccgcttaaacgtcactttgctgagacgctcgcgttcagctagccattcgtccttcagctcccgaatcgttgtgccgaactcgctctcatagccttcaagcaagccatgcagtttgccaagcgtcgctttcgcatccgctaccacttggaatgcatcaagtttatacgcctgcattcggctgacgttaatgttcaaaaacttcgctttatcaaaatcaaaagcggtcttagaggatgtcgcaaaatctgtataccttgtgccgatgccgataatcaaatcagcttggcgggccgctttgtttgccgcaagtgtacctgtgatgcccattccgccaaggttgttcgcaaaatctgcctcaacagtagactttcctgcctgcgtttcaactaacggaatgttataggcttcagaaatggcaaccaattcatcgcgcgcaccggaatattttgcgcctccgccgacgagaatcacaggttttttgctggatttaatcagctccgccgcaccttgaagctcgcgctcgctcggctgcatgcgatcaatatagtgaacccgtttgacgaagaaactttcatcaaaatcgtatgcttccccttcaacatcctgagaaatacaaatcgttgccggacctgcttttgccggatcagtcatgacttcaaacgcgcgcagcaaactgctcatcagctgctcagggcgcgtaatgcggtcccagtatctcgatacaggcttcaatgcatcgtttgtcgtaatcgccgcactgtattcttgctccatttgctgcagtacagggtctggctgtcttgtcgcaaatgtgtctgccggaatcaagagaactgggatattgtttgccaatgcagtgccggctgccgccaccaagttagccgctccaggtccgacggatgtagacaccgcatatatttttcttctcagcatttgcttgctgtacgccatggccgcatgcgccattccttgttcatttttcccttgatagactttcaaatggcctgcatcctgctcaagcgcctgcccgatccctaatacgtttccatgaccgaaaatcgtgaagatcccttcgacaaaaggctcttcctttccatctacatggatgtactgctggtttaagaatttaatcagcgcctgtgctgttgttaagcgaattttcttgcccacaaacgatcccacctttactcgatctttttcaattatgactgtgcttcaataagctgtacgatttcatcagcagtcggcatcgcttctgacgaactgtgcttgctcaccacaatggaagctgaagcactgccgtatttcaatgccgtttcgatgtcttttccggtgacaaggccatagataaaggctgacgcataggagtcaccggctccaaaagttttcagcacttttgtcttgtacgcttgagcgcggaatacctcgccggatttgctgtatgcgtaagagccttcgacgccgtgtttgatgacaacgaggtcggctgaatggccaaataaatgattgacggattcttcattgcttccgcctgtgcggttttccatcacatcaaattcatcgcgtgtgccgatgacgatatcagactgctcggcaaccaaagaataataaacggctgtttcatctgatgactgccacgtatacgggcggtaatccagttcgaacaccactttaacctgatgcttcttcgcgtattgaacagcttttaataccgcttcccgtgacgggcttttggcgagcgctgtcccggaaacaagcagcattttcgcatttgcgatatagtcttcgcttacctctgaaggctcaagataaagatccgccacatcatcgcgatacattaaaatgctgcattcttcagggctgaggatttctgtaaatgcaaggcctgctttgtgtccatcttgatcaacaaccatctgtgttgtatcaacgccggtctttctcatataggactctatgaatcttccatgctggtcatccggaattttgccgatgaagcccgcttttaagccaagcttcgcgctgccgatcgcgatattcgcaggtgaaccgccgacatatttcgaaaatgtcatcgtttcttccattgggcggttgtattcgactgcgttcagatcaatacatgcccggccgatggcaacaatatcaaaagccttctcttcattgaatgtatacttcatcgtaaacagccactcctcacttgttagcgttctaaaatccattcatgcgccgggtcgttataaaacttccattttcgcgtcggccctgccatgacatttaaatagtaggatgtgtatccgtccggaacgcctaccgggtggtatcccgcaggaacgatgacaacgttttcatttcccacagtcattgtctcgtcaatagaacggtcatctgtgtatacgcgctgaaacacaaagccctgtcccgggtctaactcatggtagtacgtttcttctaagaaagattcttccggcaagttgtcttgatcatgtttgtgaggcgggtagctggaccagttgccgctgtctgtatagacttcaactactaatagactgttagctgaagggtctgaatccggaagaatgttatgaacagtacgtttgtttgaaaattgcccgcgatgctcaattccgttgtcttccgctttgatcagctttgtcggaagctgcttttccgatggagaatagcaaagcgccactcttgcgtcgctgactgctgtgatctcaaatgcacggtcatttgatatatagacgctgtctgtcggttttcgttcaaatacgctttcacgcgtgccgatattctcaaaagtcgactcatgatctgtcactgtaatttttcccgttaccgccacaatacagatttcttgttttttcaattcttctgtatagcttgaacctgatgcaagatctaacactttaaactctacataagtgagatcagagttggatgtcgttacttcgtgcacgagtttgaccccattagacacttcatgcgactgcggcttacgcaacaaataactcatagagaagccctcctctttctattggcagaatgagtccgaacagcgcacatggacgccgttcggctgttcgtcgtttagttgaaatcaggtgccggatatcttgccgtcaccacttttttacgtgtatagaagtcgacgctgtcttttccgttcgcatgcagcgttccaaagaatgaagatttccagcctgagaatgggaagaacgccattggagccggcacaccaaggttgatgcctagcattcccgcatcaatgttttcacggaagtagcggattgcgtttgagttggatgtgaacaagcaggcgccgttcgcaaactcagacttattggcgatttcaatcgcttctttcaggtttttcacacggatgacagataagaccggagcgaaaatttcatctttccagatcgtcatttctgttgtgacattgtcaaagatcgtcgggccgacaaagtagccgtcgtcagacacattttcacgtccgtcacatacgagtctggcaccttcttcaagacctttttcgatatagctgagcgtgcgcttcttgttgtcttcgcgaatcaccggtcctaagaacacgccgtcatcaaggccgttaccgattttaatgtccgccactttttcctgcagcttcgccataaattcatcggcgattccttcttcaactgtcacaaccgcacaagccatgcagcgttcaccggcagaaccgaaggcagctccaacgatgtttgtaaccgtgtcttcaagattcgcatcgttcaagacaatcgtatggtttttcgcgccagtcagagattgaacgcgttttaagttttcgcttccttttttgtagacgtattcgcctactggcttggagcctacaaatgaaatcgctttaatttcgggatgctcgaggatgccgttcacaacgtcatgcgcaccgtatacgacgttgaacacccctttcggaaggcccgctttttcaaaaagctcaaccaatttctctgttaacagcggagtccgctcagatggctttaaaataaatgtgttgccgagcgcgatcgccatcgggaacatccagcaaggaaccatcatcgggaagttgaatggcgcgattccgccgacaactccgattgggtaacggtagttcgccgcttcaacgtccgttgcgatggaagcaagtgagtcacccatcatcagggaaggtgctccagcggcgaactctacgttttcaatcccgcgtcccacttcacctaaagcttctttcgtgttttttccgttttcaatggtaattagatgagcaagttcttctttatgctgagacagcagctgctggaagttaaatagaattctggcgcggcgaggaaccgccacctttgaccatgttttaaatgcttcagccgctgtttgcgctgcgtaatcaatatcctcttttgtagaaatcggcacttggcatagcacttctttcgtcgccggattgacgacatcttcatattgatctgttttgctttcaacccattcaccgttgatgtagttttttaattttctgatttctgccattcttattgcctccttcattagtaaacacatacacttgtatggatggttccggatagattcatatcaatatccacttttcagcaagccaagaattaaacgctttcaaaaacaccaaaaaaataaatggcggatgcatatttacatacaagcaaccatttcatgcacaacaggttactttttggtcatttcttggttatattctaatcgcataatacccataagtcaatcataaacactacattttttcattatttttattatattaatcttttaatcaagtaagagaagtaagagaaggccgtccaatcttgcaaaagatatacaccgatgttatcattttttaagcaactattgattaacttttggtttttattatatatttatgttacgtaaagattcaagaaggagttttttatatgaaactgatgcggattcaggaaatggaggagtacattttatcgcatggcactgtttccttagatgagctgtgccaggtgttcaatgtctccaaaaacacagtcagacgtgatatcaacaagctaacagaaaagggtgcgattgaaaaagtatacggcggcgtaacatctattgaaaaaaccgcattagttccttttgaaaatcgcaccattcagcaccaggatgaaaaaacaaaaatcgcccattatgcttcccgatttattgaagatcacgatttggtcttcattgattcaggaacgacgacaaagtctattcttgatacgcttgatccagccaaaaatgtcaccatcttaaccaacagtttagacattatcaatgcggcgtcagctttgaagaatatcaacttaatcattatcggaaacaactataagagaaaaacccgctcctttgtcggcatggacgacccggctatgcttgataagtacaatatcaacaaagcctttatgtccgctaccggaacgacgctgactcacggattgaccaattcggatctgctggagtatgaaattaaaaagaggatttcagaaaaagcaaaagaagtgtatctattggctgaccattctaaattcggaaaatcaacgcttctgacgtatgcaccgtttgacaggctgcattgcattgtgacctctcagccattagacgacgagtacacgcagtactgcaatgagcatcaaatcggcattcatctggcctaacgtttacaatagtgttgagagtctatcatccattttattctaggaggcagatcatgaaaaaagcgaagctcggaaaatcagacttgcaggtattccctatcggattaggaacaaatgctgtcggaggacataacctctacccgaacctaaatgaagaaaccggaaaagaattggtgcgcgaggcgatccgtaatggcgtgacaatgttagacaccgcttatatttacgggatcggccgttccgaagaattaattggtgaagtgctgcgtgaattcaaccgtgaagatgttgtcatcgctacaaaagccgctcacagaaaacaaggcaatgactttgtctttgataattcaccagaatttcttaaaaaatcagttgatgaaagcctgaagcgcttgaataccgattatatcgatttgttctacattcacttccctgacgaacatacgcctaaggatgaagccgttaacgcgctgaatgagatgaagaaagccggaaaaatccgctccatcggtgtatccaacttctctttagagcaattgaaagaagcaaacaaagacggtttggtagatgtattgcaaggcgaatacaacctgttaaaccgtgaagcggaaaaaacattcttcccgtatacgaaggagcataatatttcatttatcccttacttcccgctcgtatcaggtttattggcaggaaagtatacagaagatacaacgttcccagaaggcgacctgcgaaacgaacaggaacacttcaagggcgagcgtttcaaagaaaatatcagaaaggtcaacaagcttgcgccgattgccgaaaaacacaacgtggatatccctcacatcgtattggcctggtatttagcaagaccggaaattgatattttaatcccgggagcaaaacgtgccgatcagctgattgataacatcaaaacagccgacgtgacgctttctcaagaggatatttcatttattgataagctgttcgcataagaagaaaacagccttctccattggagaaggctgtttttttgtgcgataaattcctaaataactgattttgaagcaaaaccttacaaaatgagccataaatccgataaaataaaggtagtttatctcagaaagaaagtgattgagaaagcaaaagtatgaaacgttcatatcatctagctcatatgaaataaagctgacccagcttcttttatttgctggtcagaatagcggaccatttcgatggtctatggaggaaacagaatgaaacttaaatatgtaaaagccttagttgcagtaaccgttgctttaggtgtactgctgccatcaacgatttctcatgcaaagagctttagcggccgctcatcatctagttacagcagccgaagttcaagctcgtcatacagcggaagctataaatcaagcccgaaatcaagctacagctcaggatcaagctcttctagcaaaaaatccaagacgcctgacgattcatcatcatcgatttcgcttaaaaagaagccttcggaaaaggcaagctcatcaagctctaaaaaatcgtcaggcaccttttccggcgctacatcaaaagtaaccggaaagacatacagcggaaaaacgtctaaagcctatgttggcggacgatatgtttcagtcaatcattactatcacgcaggtttcgcgccatcaggatggtttggatattatagcggatttacaatgggtatgttcatgatcagcatgatgcacccatggggttacacctatcatccagtcggaggcccaggttatgtttcttatggcgcttcacccattgcctggatcgttgatatcatcgctttgattattattttaatcattgtcatcgcactgattcgcgcatttaaagcaccgaagacgtacagaaggagattttaggcaatgagattaatattaaatgagcaagaaattgtagacggaatttgcgtgtatatttccaatgaagaagatatctaccctgaagacgttgaagtaaaggagctatcttataacaagcgtacagggttcttcgctgaagctacatttggcctgcaccacaagcagcttatgtcagatgacatttcagaaggcattattcagttcttagaggaataccacaacttcaatccggacgttaccgtcgttgaattgcaatttgataagaaaaaaggcttctccgccttggttttcgtcaacgaagcagaagaataaaaatgtcttaatcaaaaccttactccgcgcgggtaaggtttttttaatggtttctctgagcataaagttatttcgtttttcctaaactcagcggatctgtgatcatctcttttggctttaacgtttccgtttgttcaaaacaaatgtttcaaatgagataggaaatgggtactaatctattaactttgttatacattttagatactcattggctcaacaactgaggaggagacatttgtgaagaaagacacaaggaaatatatgatctactttttcggcgctttagggggactgctatatggttacgatacaggtgttatctccggagcactcctgtttatcaataacgatattcctttaacgacattgacagaaggattggttgtcagcatgctgctccttggcgcgattttcggttcggccttgagcggcacatgctcagaccgctggggcaggagaaaggttgtatttgtcctttccatcatttttattatcggtgcgctcgcttgcgcattttctcaaacaatcggcatgctgattgcatctagggtgatactcgggttggccgtcggcggttcaacggcacttgtgcccgtgtatctttccgaaatggcaccgacgaaaattcgcgggacactcggcacaatgaacaacttaatgattgtcaccgggattttgctcgcctatatcgttaactacctgttcacaccgtttgaagcgtggcgctggatggtcggtctggctgcagtgcctgccgtgcttctattaatcggcatcgcgttcatgccggaatcgccaagatggctcgtgaagcgcggccgtgaagaagaagcgagacgcatcatgaacatcactcatgatcccaaagacatcgaaatggaattggcagagatgaagcaaggggaagcggagaaaaaagaaacgacactcggcgtgctgaaagccaagtggattcgccctatgcttctgattggcgtcggtcttgccattttccagcaggcggtcggcattaacacggtcatctactacgcgccaaccatttttacgaaggccggtcttggcacatcagcttcggcgctcggcacaatgggaatcggcatcctcaacgtcatcatgtgtatcactgccatgatcttaattgaccgtgtcggccgcaaaaaacttctgatctggggaagtgtcggcatcacactgagccttgctgctttatcaggcgtgctcctaacgctcggactttccgcatcaacagcgtggatgacagtagtctttctaggtgtctatatcgtcttttaccaggcgacatggggtccggtagtgtgggtgctcatgcctgagctcttcccgtccaaagcacgcggagccgcgacagggttcacgactttggtgttatcggcggctaacctgatcgtgtcgcttgtctttccgctgatgctaagcgcgatgggcatcgcatgggtctttatggttttctcagtcatttgtcttctctcatttttcttcgcgttctacatggtgccggaaaccaaagggaaaagcttggaagaaattgaagcaagcctgaaaaaacggtttaaaaagaagaaaagcacccaaaaccaagtgctgaatgagcgtacattataaaaaaaggaatcgtctccttatgggacgattcctttttctgtttacaccatgaccttgcaaatattgttcgtaaattccacagggtcctgaatcggcaggccttcgatgagaagcgcctgattgtacagaaggtttgtgtacaggctcagcttctctttatcttgttcaaacgcgtcctgcagcgtttggaatacctcgtgatttgggttgatttccagcactttttccgccttcacattttggctgtcaggcatcgcgtttaagattttttccatctcaattgtcacttcgccgtcagcagcaaggcagactggatgtgatttaagccgttttgagattctgacgtttttcactttgtctgacagaatgtttttcatttcctcaaacagatccttatacttgctttcctcttcctcggactgcttttgatcctcatccgtgtctatgccaaggtctccgcttgatacggacttgaattctttttcctgataagaagccagcattttaattgcaaactcatcgatgtcctcagtaaagtagaggatttcatagcctttgtccgccaccatttccgtttgcggcagtttctcaatgcggtcgtaagaatcaccggtcgcgtaataaatgaatttctgctcctctggcattctggaaacatactcgtctaagctgaccagttttttctcttttgaagagtagaataataggagatccttcaattgatccttattcgcgccaaaatcattgtacacgccgaatttcagctgtctgccgaacgacttgtagaacgtctcgtatttctcgcggtcttttttcaacaggctttgcagctcgcttttgattttcttgctgatgtttttcgcgatcagcttcagctggcggtcatgctgcagcatttctctggaaatattcagcgatagatcctcagaatcgaccatgcccttcacaaagctgaagtggtccggtagcaggtctgcgcacttattcatgatcagcacgccattggaatacagctccaagcctttctcatattccttggaatagtagtcaaacggcatgttttcagggacgaatagaatcgcgttgtagcgaacggctccatccacactgatatgaacgtgtgtcagcggtttatcaaacccgtaatgcttttcagcatagaatttttcgtaatcctcatctgtcagctcgcttttgttttttctccagatcggcaccatgctgttgaccgtctgctcttcctgcacctcttcaaattcattttcgctgccttccttcggcttattaatggttgtatccattttgatcgggtagcgaatgaagtcggagtacttcttgatgatcgcttttaaacgatattcctctaaaaactcgtcatagctgtcatcttctgtgttctctttgattttcaggataatgtctgtaccgacagaatccttttcacacggctcaatcgtatagccgtctgcacccgcagactcccatttataagcctcttcgctgccaagcgctttactgatgactgtcacgacatcggcaaccataaatgccgcgtaaaaaccgacaccgaactgcccgataatgtcatgtccgtctttcagctcgttttcctttttaaacgcgagggaaccgctttttgcaattgttccaagatgctgttcaagctcatcctttgtcattccgatccccgtatcagagatggttaatgttctcgcatctttgtcagctgcgacctttatgtagtaactgtctttatcaaacgtaagcgcatcgtccgtaagcgctttgtaatagattttgtcaatcgcatcactcgaattggagattaactcgcgcaggaaaatttctttttgggtataaatggagttaatcatcatatccagcaagcgtttagactctgctttaaactcttttttcgccactcttgatcgctcctttaccattatgtaaacccttttcagcatctatttatcacataagatgacaattgtcaatcaggttgatagatgcatatatatgtaaatttaacattagttggatttgttttcactctttttctcactcattctcataaaaaagagaggcttcatcatcctctctttttttctgtgtcattccagcggccaaactcccgcttcatccatatatgcaccgggtagaaaaacaaaccgaacggtatcaaaaacaatagattatgccatgaagcattcagaaatgcgcttgcagtcactggaaacgtaatctcttgcaataaaaaagagatgacagtcagcacaacaaatgcagatggaatggtcacgatgcaataaaacttgagctccttcttatgctgtaccttcaaacttagaaacctcccaacaatttctaattcatcttaacatatgctggcctttcttttctcgcatgtttatcactgcacatagcgggaagacaaatagaaaaaggaggtctcgtatcatgggaagacttgaaaacaaaacagcagtgatcacaggcgccgcgacaggcattgggcaagcgacggcagaggtttttgccaatgaaggcgcgcgtgtgatcatcggagatatcaataaagatcaaatggaagaaacagttgacgcaatcagaaaaaacggaggacaggccgaatcctttcacctcgatgtgtcagatgaaaacagtgtgaaagcatttgctgatcaaatcaaggatgcatgcggaacgattgatattctgtttaataatgccggcgttgatcaggaaggcggaaaggtggacgaatatccggttgacctgtttgaccgcattatcgccgtcgacctgcgcggcacattcctttgcagcaaatatttgattccgctcatgctcgaaaatggaggctccatcatcaacacctcctccatgtcaggccgtgccgcggaccttgaccgctccggctacaacgcagcaaaaggcggcatcaccaacctgacaaaagcgatggcgatcgactacgcacggaacggcatccgcgtcaattccatttcaccgggtacgatcgaaaccccgctgattgacaaattagcaggcaccaaagaacaggaaatgggcgagaaattccgcgaagccaacaaatgggtcacgccgctcggccgcctcggccagccgaaggaaatggcgacagtggccctgttcctcgcgtcagacgacagctcatacgtcacaggagaggacatcaccgcagacggcggcatcatggcatacacatggccagggaaaatgctgattgatgagaaatggaagaaagaaacgaaataagagaggggatgtccctctctttttgtctttcaaagcaatacaaccttatactttttcacatccaaaaactgcaaaaattccctcgccagcacttcaggcggatgcgcctttccttcatccagccgatacaaaagcaacccgataatcattgcggatacataatgggcataaagctttttctctgcgtgaatatcagtttgctgatgcagataaaacgattccagcgctttgaacatatcaggtatcacatgaggaacaccccattcccgattgagaaaatggacaatgggcatatttgacaaagcagaaagcagactggcgagcgccttctccgcttcctttaaggaaaattcattcgggctggaggcaatcgtcaggtgatcaatgatctccgcacatgatcgctgtatcatggttcggagcaattcctccttattggcatagtgatcataaaaggttgcacggcggatattgcttttccgggtaatatccgaaattgtgatggctgcgtagtcttttttctccgccagcacgtccagaaatgccttctggagcgcctctctcgttcgaaccacacgcctgtcgatttgcttgtccttctctcgctctcctggcacagcttgtccaaacagccaataaaatctcttttgagaaacaagctcccataccttttggctgatagcttccggagtcgcggccgcatcctcattcagccaatacaggataatcgcgtacgtgtacaaggcccggtaatgtccgtaaatttcccgttcgatcggcgtcaaattcacatggaccggagtcagcagcacatcctgctgaaacacatccttaaaaaaacgatggaaatgccctctgttcatcatcacagaaaaaaaggatcgatgctcatgaacaaaggacagcgtcggatgcaccgtttgccgttttttgttcaaatggagggtatccatatgactgaaggcgccaaaaagcgctttgcccagcccttccttcttgtcttcgattaaatcctcaatgattgaaaacttatcctcataataaaggtagagcgatccgcggctcactttggccttttcagcgatttctttcattgtgatgtgttgaatatctctttcttccaataaagccagcagcgcctctttcacttgagcttcggcagattccggcacaaaagacacccccaatcattagacagatcttcgatatatgtacggtaacgtatagatggttcaccgttgtctttcttacagaaaaggtaccaccttataataggtccgagaaaagaagaaagcaaatgagggggattttacaatggaacagcaagtaaaggacgacatccagcgtgtctttcagcttcagaaaaaacagcaaaaagccttgcgcgcttcaacagcggaacagcggagagaaaagcttcaacgctttttagattccgtcatcgcccatgaagaagaaatcatcgaagcgatccgcaaagacgtccgcaaaccatatcacgaagtcaaaaaagcggaaatcgaaggaacaaaaaaagcgattagagataatatgaataacctggaacaatggatggcgcctaaagaagtcggttcatcgttaagccctgacgcaaacggaattcttatgtacgagcctaaaggcgtcacactcatcctcggcccgtggaactatccgtttatgctgacgatggcgccgcttgccgcttctctcgcagccggaaacagcgcgattgtgaagctgtccgatttcacgatgaacacgagcaacattgccgctaaagtgataagagacgcttttgatgaaaaagaagtcgcgatttttgaaggagaggttgaggtggcaaccgaactacttgatcagccgttcgaccatattttcttcactggaagcacaaatgtcgggaaaatcgtcatgacagcggctgccaaacacttggcatctgtcacacttgagcttggcggcaagagcccgacgattattgacagtgaatacgatctgatggacgcagcgaaaaagatcgccgtcgggaaattcgcaaacgccggccaaacctgcatcgcacctgattacctgttcattaaaaaagacgttcaggacaggttcgcggggattttacaaacagtcgtcaacgctggatttatggaggatgatcataccccagaccgcagcaaatttacgcagatcgtcaatgaccgcaacttcaaccgcgtcaaagatctgttcgacgatgccatcgaaaaaggggcggaagtggtgttcggcggcgtatttgatgccagcgaccgcacgatctcgccaaccgttttgaaaaacgtcacgcctgatatgaaaatcatgcaggaggaaatcttcgcaccgattctgccaatgatgaactatgaagacatcgacgaggtcatcgattacgtaaatgaccgcgataaaccgcttgcactttatgtgttcagcaaaaaccaagacctgattgacaacgtccttcagcacacgacatcaggaaatgcggccatcaatgatgtcgtcgtccatttcagtgacgtcaacctgccattcggcggcgtcaacacaagcggaatcggctcctatcatggggtatacggattcaaagagttttctcatgagaagggtgtatttattcaagcctctaaataatcataatgaagagaatctgcatcatcttgcaggttctttttttatctttatatcacctaaataaagagattaaaagtgataaaatacaattttcaaacgagacaaaattcctctagtctatctcattgaaaccctgcagcccctaacgtataatacccagaaaactttaaaggagtaaaatgatacatggaaaaaccagcaggattttggattcgggcagccgcctctattattgatgtatttattatagctatattctctttcattatgattttattaacaccttcattgtgttgccactcattgatgcagcaggtacacacatgtcagaagcccgatatgagtttttcatgttgatcattggcacaatccctgttttggccatcatatttattttcgctattctttactatagcttgctgacttcctcaaacatgcaagcaacattgggaaaaaaactcatgggcatcatcgttgtcaatcagtatagcgagcgtatttctttttggcacagcttcggccgtttcttcgcttacacattatttaagatcttatatatcggttttatcatggcggcctttccctctaaactggcattacataattatatttgcgggacaaaggttgtctataaaaataaatatcttgattgatcaaaaaaacaggctgccgagttaacctcgccagcctgttttactatttcccaaaagccatcagcttcgtataacttccaatataaagcgttccgtcctcagcgagctgaggagatgacactacgttgctgtcggtttgatatttccataattcattgccgtttgcgtctgccgcataaaccttcatatcatctgacccgaaataaaccgttcccttcgcgtcaatcagcggcgccgttctgacagggccgtctgtgtagaatgaccagttcatatccccgtttttgctgatggaaaacagctcgccgcttcctgagccgatgtagatattgccattatgatcaatcgcaggagatgagctggagaacccgtttagcgggaatgtccatttcaaactgcctgttgatgtataagcatacagctgtccatcttggttgccggcataaatgtttccgtccttatcaatcaccggatatcctttaaacgcatttgacgtcgttctggaccatttcacctgtccggttccggagttgatcgcataaaacacgtaattatatgtgccgacatacacggtgccgtttttggcaagcaccggcacagagctgacgacaccatttgttttcaacttccagcgctctgtccaggttgattttgacgtcggtttgatcgcgtgaacataattatcaagtgttgagaaatacaacgtcccgtctgaaccgatcaccgtttcagagcttggcccgccgcttaacggaaccgttgttaaaatttctcccgtttctttgtcaataaaataaatctttttgtcataggatgccaaatagataacgccgttggtcccaagtacaggagattgcgtatatgtttttccaagattgcccgtcacccatttgactgagccgtctggattaaaggctttcatttccccgtctctggaatgaagatatactgtgccgtctccgtcaatcacagcccccgctccattttgcggagtcgttctgatgtcgttttgccatttcagcgtcccatctgtatttccggcgaaccggctttcgcgtgaccagttaaacatggcaggcgccatcgcttgtacatcatatcttcctggcaaaaagccagatgctccattattttgagaaaacaccgtttccgccgcataagcagctgtcggctgaagcactttggcagcgggcacatcagaaacagcgccggccgaaacagccgccgccaccgcagctcccgcaatcaaagctttcatacgaaatgacttgaccatcattgagacccccattatatgtaacttctaatttgtgaccatcataacatattcatccattttataaatctatttcacaaaaacatcacaaactagaaaactatgtaagagtattcacggacgttttttcagcacccggccgaaatgcagccacaaaccaaatgacgttgacagcagccgcagcgagactaattccgaaaacaaagatcacctcagaaagcagatggtcactaaagaaactaaacatcaagataaaaccggccgaagacaaatgaatcaaaagcccgaagccgcaaagcaccgccatgacatacctcattgcatcgactccgagcatataaacgagaaatggaatgaaatacaatacaaggatcataccgacagctgaccacatgccagctgaattaaactgattggccgccgctcccgttccggccagcggcgtaagtgaagccgccactatcacggcgcaaaaaagaaacgcagaaatggttgtcatgatcgccacgctattttttttagacatcaaactcctcctttaatagaaatattaacctttttcattataagtaagttgaatgttatattcattatattttttaaaaaaatccagatcgtacaaaaatgatatgattctttctagtatatttatatagtaaaaaacaaaggataaaagactcatttttctgtaatatcaggattttatcaccataccatattgcatgtacttgtttttcaaagtatactattccagattaattcagaggagagagaaaaatacatggaaaaaccagcaggattttggattcgttttttagcttattttattgatggcattattgtatctgttcctagttatattattctatttgtgatcaattctgtttttgtagctggggctgtggcaacaaacccttacatgacggaagaagagtatttagtgaaatacatgacgcttgcatttttgcctactatgctgatcatgatcgtcatcagtgtgttatattacgggctgctcacagcttctaaaatgcaaggcacacttggcaaaaaaattcttggcctgaaagtggtcaatgaacaaggtgaacgggtttctgtcggacagggaattggccgttactttgcctatatcttatctggaatcatcttttatatcgggtttatcatgatcgcctttggagagaaaaaaggcctgcatgacatcatttgcaaaacacgtgtcgtgtataaataatagaaaaaagtctagacgccaataggcatctagacttttgttttctttacaataggctgccacgacagatacgtagcgcttctccacagccactcaaacggccccatccgaaagacacgaagccaaaggtggctgaagaccatttgaacggcacaaaccgtaattgtaatgagcacaccggcagcagggtacacttttccatacaggcccaagccgtaatgataaaaaatccaagtacacacaatagactgcatcaaataattggtaaatgccatcctcccaacagcggagaatgattgcagcactgttctcactcttgttttatgataaagatagacaaccgttgtaacatagaaaaacatgaggaaaggcgcgccaatcagcagaaatagttccttttccgttacactgtacagcacatgggcgccgatgccgatgacaagcccagccatccataatcgttttaatcctttgcgatgcttttccggttcatgcaaataccgtgattttgctgccgcagctcccagcaaaaacatgctgaaataaggaatggatgcaaagaagaagttgagcggattatacgtaagcatgccattcgaagacatataaacaagacggtcatggatccgctgttctgcaatgtccttcaggctgccgcttccataaacatgaatcgcttgtgttgcctgctgtgttaccgcttgtacccattcctgtccgtttgattgatcaaaacttgtcaacatgaacggaatggaaaacagaagatacaaagagaccgcccatatcagcagtgttttcggctttgcttttcgaaacaagagcaggacaaaaccgagcaaggcatattctgttaaaatatccccgtcccatatcaaaaaggcatgaatcgttccaaacaagagaagcgccattaaccttctcacatataacggaacaaaccgtttccctttgttttctgctctctccatcatgacaaccatgccaaatccaaataaaaaggaaaacaataaaatacattttgtttgaatgaagaatttcagtatgtctgcggcggcaaaatcagcttcagaccacttatccatgaaaaaattctcttttccaagcatagacaaatacatatccggataactgaaatgtgccagattgacaaataagatgccgaaaatcgccattcctctcagcacatcaagcacaccgatccgctcatttgttaaagtcggctgtaatgaagacatagccatcacgctccttttttctgtaccttaagggtatgaaaaaatgaagcgcggaaacatcgatttaggtgtcaggccggcatgaaaaccttacaatcttgtcatctttatggtttcatcacctttaaatctaatgcttcgatattctgcaaaacgcgatcaaaacgcaaagcctgaggctcacatgggaagatgtggccttcatacgggtcgcctaacgtccggaaaaacggttcaaataaaccaggaaccaatacgcccaccatctttgtatagtaagaatcaaggcgataggagtgaacggtatttgcagggacatgcaggaaatctcccggattcagctgaatttcctggccatctgcccacatcgtcatctggccttcaaggcaataaaatgtttctgtatgatgttcatggtagtgatcaacgattcggtcacctttagggccttcagaggatacgacgataaactggccatctgtatttttttgtgcagccacaatgcggtgaagctgatctccagtcaacaggcgatctccttctccagattcaagaacgtatggaaccgctccatctggcagctctgtaagttccgctaatttggccgaacatgcaggcttttcttcatctagaaatacaatgtccgctacagcggctgcttctgcaaatcgctcgtttgagacttcttcgcttgcgtacggcggatgttcagcgtgatcatacggattcccaataacggaatacaagtgcgctacgtttcctttcatcgtgtaagataccagtcttgttctgtggctctgcatccggtagctgtgcggtgttcccgccggaatgttggcataatcacctgatattaataaatagcgttcaccatcaagtgtcagttccagtttcccgtccaaaacgagaattccttcatgtgtgtccttgtggacgtgaagcggaaaggcatctccttttcccccggaaagaagcacgatctcaaacaaatcacctgtgctcctcccattcgcaatcaccgtggcaacctgtctgccgaacagatagcgctcgccttctccgctccggagcaaataaggcattttttctttgggcaatgaatgtgtacataatgttttcatattatcgcttcctccaatttagaccagtctatatactataactttctgactagaccgttctatataattgtaggagaaaggataacaaaatgctaccctttttttctcaccagcactggtatttgttcggcaatgagaagaagaggcgttttgtctttattcgttaacgaaagcatgatgccgccctcaatcatcgaattaatcagcgttccaagctgatttgcttcttcttctgcaaatccgttttccattaattttctggcaaaaaccgcttcccagcttttaaacaccttcatgcaaaccgtccgtagcggttcactgattaacgctgtctcactcgccagcaaaccgactggaatacctttaatgctttctgtgttgtcaaattggctggctgtttttttgataaaaagctgaatcgcttcaataggatcagaggattcatccatgctttgctgtatcagatgttcaacgatcttacctgtatatgtaaccgcttcaattgctaattcttctttgccattcggaaaaaagtgataaagcgatcccttaggagcaccgctttcttttacaatctggttcaaacctgtcgcgtgatatccttgcagctggaacagacgtgacgccgtgtgaaggattttttcacgtgaatctcctctgctagtcattaaaacattccctcctaggtatggtagagcgacttatataatataaaaaagaaccctgtgattgtcaaaaggggtaagacccttccggatggggtaatgtacaaaaacagcgtctaggagggatctctcaatgacaatcgatcattcagtcacgaatacagagcagcttgaacaacagaaccccggcatgaaaacgaagatcaaactgaaaaaactcaaggatcaggtgatcgtcattaccggcgcttcaagcggtatcggacttgtcacggcgagaatggcagctgaaaaaggcgcaaaggtcgtggcagcagcgcgaaatgaagacgcgctgaaggagctcactgatgaacttaaggaaaaagggcacgacgccatatgggtaaaggcggatgtcggaaaagaagcggacgtcaaccgcatcgcagaaaccgcgatcagcacattcggccgctttgacacatgggtcaacaatgcggccgtctcgactttcggacatgccatggacgtcaccgttgaagacatgaagcgcatgttcgacacaaatttctggggacctgtttacggaacaagagcggctgtcaaacactacactggcagaggtgtgccgggcgcactcattaatgtaggaagcctgttcggagacaggggaacagtcattcaatccacatatgcgtctgccaaatttgcgcttcacggctggacggaaagcatccgaatggagcttgaaaaggaacaggcgcccgtctcggtaacgctcatccacccgggcagaattgacacgccttataacgagcatgcgcacagctacctcgacaaacagccggctcattaccgctccatgatctatccgccggaagcagtcgccgaagctatcctgtttgccgccgaaaaccctaagcgcgacatgtacatcggctcacaggccaaagccatcgccatgctgggcgcgcttttccctcgtctgaccgacagactgatggaaaaaatcatgtatcacagccagcatgccgaaagaccgtccaaaccgcgagaagaaagcgctctttatgatgcgggctgcggtatgcatgacagaggcacaaataaaggatggatgaggtcaagaagctactacacaaaagcgacgaagcgccccattgtatcggcggctgttgttgccggactagtggcttgggctgccgccaaacgatgcagataatctctgaccatgatagaaaaacccatgctgttccagcgaaccatgggtttttcagctgttaatcgataaaagccttgttcatacgctgcagcagctcgccaaacatctctttttcctgtgttgaccattctttcagcatctgttcataacgttcaaggcgcttttgctgatcggcttttaatagttgtttgccgagttttgtaatggtaaacaggctgactctcccatcagatgggtctgagaaacgatagatgagctcctttgcctctaatgcagctgcttgtcttgaaagagtagaaatatcaagcttaaacgattctgccaattccttaacacgagcaggcccaaactcatccaattgtctcagtaataagtacgaagatctctccaaattccctgttcttttctccgattgatccagataaacagctctcctgataaaagtcgtcagctcatattcaattaattcaactggattttgattttgcaatcgctctcgctccctattccaatctccggcattgacaacatcatatatacttgtataatacaaatgtacattaactgaataaatacaagtcgttatatgactaaatcaattattatacttgtatagtacaatcatataaaaagaaagtaaagcgattcctcagaaccatcctagaagcaagcaccagaaaggaggaagctgttctgattggagagcagcacttgatgtgaaagtcatacgaattattttgcaagtgttgatattatatgtattttttatgatcggggaagccattcagcatctgtttcatttacccgtgtcaggaagcatcgttggattggtattgcttctgatctgcttgggcctccgtattgttcccgtctccatcattgaagacggagcagggtttttattatccttccttccattgttgttcatcccggcaatgacaggagtgataaactatccgtctctcatttcattcaatggcctgatgctgctgattacagtcgttctgagcaccatcgtcacgatcattgcggctggattcgccagccagctattagagaaaaaagcaaaaaaacgggaggagaaagagaaatgcagcaagcatgtatcgcgatcattataattcttttaacagttgccgcttatttagcgatggtcaaactctataagcgattcccgcttccatttcttatccctgttctgacaacgaccattttgattgtagcggctttgatgatgtttcatgtttcctatgaaggctatatgatcggggggaaatggatcaattctttgcttgggccggctgtcgtggcactggcctatccgctttataaacaatggcatatcattgtcaaacattgtgttcccattttaggcggcgtcctggtcggattatgcatgggaatgatcagcgggctgatcttcgcagaagcattcgggattgatcatgatctcttattatccattctgccaaagtcgatcacaacccctgtcgctattcagatcgccgccggtcttggcggcgtcccttccatgacagtcgtatttgtcatgattgcgggcttttcaggcgtcatcctcgggccgcttttcctaaaatggcttcgcatacgcagttccctaggacaaggcattgcattaggcagcgcctcccatgcactaggcacctccaaagcattggaatatggagaactggccgtctccatgagttccgtctccatgacgctttgtgcggtgctcggctcattcttcggcccgctcgtcgtctggctgtttcatatttaacaaagaaagactgccccgggggagggcagtctttttcgtttaagaagcaaaaaaatcaatcagcggctgaaagtccttagataaatcaacgtcattcggttctgcttgaagcaggcggtcaatcatacgctccagctcctcaacatcattcttatccgtatattcaatgaagtttaagctttcaagccaatcccgatatgaatgtttggctttgccatagctgtttccaaagacaaggcaaggtgttttggtgataatcgagaaaatcatcgcgtgaaggcggtcggtaatcaccaatttactggagccgatgcggtccagcatctccataaaatgcttttcacgatcagcgtaatcgatggtgtctaccgtatccagcaccgtatcggtacgctctgtgtaagttgttttttctgcccattgcttcatctgtgaaataaaatcttcgtcagtcactttctccttatccgctcttaaaataaagagaacgccgtcccgctcgagctctcgcggcacaatatccaaggaaagcaccatgtccggtgtaaagatcacattggagttgaaggtctctttcacaacatccagtgtttgcgtctcacgcgcagcaatcgttaagtttgtattttgatggtacgcatcctgtgtttttttcttttccttctgtccttcctctgtatcctcaaaataaacggattgtggcagagaaattgatttgtagtctttaaacgccgaaaagacctttcttctgtcttcctcaatatcgagataaaggtttcctaagttccctccgcctgtaaagcagacaatatcgtcttcacgaatgatctccttcaccagttcaatgccctcatccgtcgcataatccataatctcaatgtattcataatacggaaaatgatttttgataaatttctcttccgcatacgcaatcgcttggtctccaatgtttgtgtaactaggggaaccaaacaaaaatacttttcgtttatcatttaacagagcttccggctccacatttggcgcaatgccttttactagttttttgcctttgattttttgtacagtcatatctgcgtcctccttctgggatgaattcctcattgtgtgttaactgtctctacccaaaaagaaggatggctatgcattggcatgtgcatcggctatatcagaaacatcgttttcgccaatttgatagacgctgcaatgtcccgcgccgttctttccatatattccgcggcatgttcaaacgcatcttctagcggcacggctccggggacgatgctgaaaagcgcatcgattccgtgttgatagacggcatcactgtcacgtgatactgatcccgcaataccgatgacaggcacatcatatgatttagccgccttggctacgccgatcggcgtttttccatgaaccgtttggctgtcgatccgtccctcgccggtaatcacaagatctgcatcctgaacgatactttcaaaatcaaccgcttcaaggacaatatcaatgcctcttttcaggtcagcctgaagataagtcagcaggctccatccaagaccgcccgctgcaccggcgccctctgtatctcggaaggttgatccgagctctttttctgtcatatcagcgaaatggcttacgttctggtctagtacatccagcatgtcggccgtcgcgcctttttgcggcccgaaaacagccgtagcgccctttggtcctgttaacggattgtccacgtcacaggcaacttccagtttgacattccgcaatctggaatcaagcccgccaacatctattgatgcaagctgagataacgcgccgcccccgggccaatctcgcggcctgagttatcaagaagccttccgcccaatgcctgaatcatcccggctcccccgtcgttcgtggcgcttccgccgattccgatgatcaatcgctccgctcccgcatcaagagctgctccgattaattctcccgttccccttgttgtagtgatgagcggatttcgcttatctacaggcaccagatgcagccctgaagcagcagccatttcaatcacagctgttctcccatctcccatcatgccaaagaaagctctcaccggttcccccagcggccctgtgacaacttgctctatgatccttccattggtcgcatcgaccagagattgaacggttccctcgccgccatccgccaccggcaattttctgtaatcagcacccggaaagaccgatttgaaacctctttctatcgcttcggctgcctccagagctgataagctttccttaaaagaatcaggtgcaatgatgattttcatccaaatcgcctctttcaaaacatgattcacttacgctagttatctccaatgtaccatattccatttagaaataaataccataatgattgggaaaaattttattaaaaattagaaatgaaagtgtttgcataaaagaaatattcacgttatcatacttgtatacaagtatacttcttgagtgaggaaggtgagtgtatgctagactccaaagacctgttgtatcccgcaaaatggctctcaaaagcgtcaaccggagttcgtgtcgcatacgagctgagaatgcggatcgtttcaggtctgattgaaagcggtaccattttatcagaaaatacaatcgccgccgagttttcagtaagccgttcgccggttcgcgaagcgctaaaaatactcgcatccgaaaaaatcatccgcttagaacgaatgggagcggtcgtaattggtttaactgagaagaaaatcgcggaaatttatgatgtgcggttactattagaaacatttgtctttgaacggcttgtcaaaatagacattgagcctttagttaaggatctcagcaaaattcttgaaatgatgaaagtctcaatcaaatatgaggacgctgacgaattttcatttcaagatgtgctgttccatgaaacgattatccgagcgattgatcattcatacattcagatgatctggaacaatctaaaacccgtcatggaaagctttattcttttatcgatgcgggtacggttaaaggaaaagtatgaagacttcacaaggatcttagataaccacgagctttatattcaagccatcaaaacaaaggatagggtgctgatgattcagtctcttcaccaaaactttgatgatgtgcaggataaggtagaagacctatggctctcacaacaaatgctggcaaaaggagctgaatacaacaatgactagttatatgttaggaatcgatatcggcacgacaagcacaaaagctgtgctgttcagtgaaaacggagatgtggtacagaaagaaagcatcggctacccgctctatacaccggacatctcaacagcagaacaaaatccggaagagatttttcaggcagtcatccatacaacagcgagaattacaaaacagcatcccgaaaaacaaatctctttcatttcgttcagcagcgccatgcacagcgtcattgcaatcgacgaaaatgacaagccgctgacgccatgcatcacatgggccgacaacagaagtgaaggctgggcgcataagatcaaagaggaattgaacggacatgaggtgtacaaacggacgggaacaccgattcatccgatggcaccgttaagtaaaattgcctggatcacgaatgaaagaaaagaaatcgcttccaaggcaaaaaaatatatcggcatcaaagaatacatttttaaacagctgttcaatgagtatgtcatcgattactcattggcatcagcgacaggcatgatgaacctgaaaagcttggcttgggacgaagaggcactgcgcatcgcaggcatcacgccggatcacttatccaaactcgtgccgacaaccgagatctttcagcactgcagcccggaaatagcgatccaaatgggaatcgatccggaaacgccttttgtcatcggggccagcgacggcgtgctgtccaacctcggcgtcaacgccattaaaaagggagaaatcgccgtcaccatcggtacaagcggtgccatccggacgattattgacaagccgcaaaccgatgaaaaagggagaattttttgctatgccttgacggacaagcattgggttattggggggcctgtgaacaatgggggcatcgtccttcgctggatcagagacgagtttgcctcctccgaaatcgaaacagcgacacggctgggcattgatccatatgacgtgctgacgaaaattgcccaacgcgtcagacccggttctgacggtctgctgttccacccatatctcgccggagaacgcgctccgttgtggaatccggatgtacggggctcatttttcggcctgaccatgtcgcataagaaagagcatatgatacgcgcggcattggaaggcgtcatttacaacctgtacacggtgttcttggcgttaactgaatgcatggatggcccggtaacccgcatccaagcgacagggggatttgcaaggtcggaggtttggcgccaaatgatgtctgatatcttcgaatcagaggttgtcgttccggaaagctacgaaagctcatgtctcggcgcctgcattttaggcctgtatgcaacaggaaaaattgactctttcgacgccgtgtccgacatgatcggcagcacatacagacatacgccgatcgaagactcagccaaggaatacagaacattaatgccgattttcatcaatctatcaagattattagaaaatcaatatacacaaattgcagattatcagaggggcttaatcacacacaaatagtacatgacatgaaggggagggcattaccatgccgttaatcatcgttgcacttgggatcttagcattactatttctgattatgggcttaaaattaaacacatttatttccctgctggtcgtatcgttcggcgtggcactggcactcgggatgccgttcgataaggttgtcagctccatcgaagcagggataggggggactcttggccacatcgcgctcatcttcggactcggtgcgatgctgggcaagctgatcgcggattcaggaggcgcacagcgcattgcgatgacgctcgtcaacaaattcggcgagaaaaatattcaatgggccgttgtcattgcctcatttattattgggattgcgttattttttgaagtaggactggttctattaattccgattgtctttgcgatttcaagagaattgaagatttctattttatatctcggaatcccgatggtcgcggcactatccgtcacacacggtttcctgccgccacacccgggacctacggcgatcgccggtgagtatggcgcaaacattggagaagtgctgctgtatggctttatcgttgctgttccgacagtgctcatcgcagggccgttatttacaaagtttgcgaaaaaaatcgttcctgcatcatttgcgaaaaacggcaatattgcatcactcggcacacaaaaaacgtttaaccttgaagaaacacccggctttggaatcagtgtctttactgcaatgctcccgattatcatcatgtcggtcgcgaccattatcgacctgcttcaagaaacaatcgggtttgcagataacggaattttagcttttatcagattgattggaaacgcatcgactgctatgattatttcgttattggtcgcagtctatacaatgggcatcaagcgcaacattccagtcaaaaccgtgatggattcttgttcaactgccatttcacaaatcggcatgatgctattgatcatcggaggaggcggcgccttcaaacaagtgctgatcaacggcggtgtcggcgattacgtagcagacttattcaaagaaacggcattatcgccaatcattctggcatggctcatcgcggcgatcctgcgcatttctctaggctcagcgactgttgccgcactaagcacaacaggtctggtcattccgttattgggccattctgatgttaacctggcgttagtcgtactcgcaacaggcgccggaagtgtcatcgcttcacacgtcaatgacgccggcttctggatgttcaaggaatacttcggattaagcatgaaagaaacattcgccacatggacattgctggaaaccattatttccgttgctggactgggattcattttattgttaagtttagttgtatgaaattaagaaggagctgtaacacatgttcaattcgattggtgtcataggcttaggcgtaatgggaagcaacatcgccttaaacatggcaaataaaggtgaaaacgtcgctgtctataattacaccagagatttaacggaccagcttatccaaaagctggatggacaatctctcagcccgtattacgagcttgaggactttgttcaatcgttagaaaaaccaagaaaaatctttttgatggtcacagcgggaaaacccgtagattccgtcatccaatcattaaagcctttgcttgaagaaggcgacgtcatcatggacggaggaaactcccactatgaagacacagaaagaagatatgacgagctgaaggaaaaagggattggctacctgggagtcggcatttccggcggtgaagtcggcgcattaacagggccttccatcatgccgggcggagatcgcgacgtctatgagaaagccgctcctatcctgacgaaaatcgcagctcaagtcggagatgacccttgctgtgtctatatcggaccaaaaggggcagggcactttacaaaaatggtgcacaacggcattgaatatgcagacatgcagctgattgcagaagcgtatacgtttctaagagaaacgcttcatctgccgctagatgaaattgcatctatatttgaaacatggaatcaaggtgagctgaaaagctatttaatagagattacagctgagattttacgcaaaaaagacgaaaaaacagggcagcctctgatcgatgtcattcttgataaaaccggacaaaaaggcactgggaaatggacgagcatgcaggcgattgataacggcatcccgtccacgatcatcacagagtccttgttcgcccgctacttgtcatccttaaaagaagaacggatggcagctcaagacgtattagcaggcccggaagccgaagaaaaacacttggataaagacacctggattgaatacgtcagacaggctctttacatggggaaagtatgcgcctatgcacaaggctttgcccaatataagatgtcatctgagctttacggctggaatctgccgctcaaagacattgccttgattttccgaggcggctgcattatccgcgctgatttccttaacgtgatcagcgaagcattcagtgagcagccaaatctggcaaacctgctgatcgcgccttatttcacagataagctccatgcctatcaaacaggcctgcgaaaagtcgtttgcgagggaatcagcactggaatctccttcccatgcttaactaccgcgctctcttattacgacggctaccgcacagggcgttccaatgcgaacctcttgcaggcgcagcgcgattactttggcgctcatacgtacgaacggactgatatggacggcgtcttccatacgaattggtctgaataacctgtcatcaaaaacacggtcagttttcaactgaaccgtgtttttttcttctatcccaaacaacagaagacataagttatgttttaaatatcataaacagtgatacaataatagctagaaacaatccccaagatcatcatgtgacagcagcttgctgttccgttctattctgcttttggccattgtcctttgcccttgcccatggtgtcataaaatgttcaaatgccaaaacggcctgtcattctgatttacaaaagtccctgaaaaccttgtctaattgagaatcagcctctcatttgttataaaagaaatgcataaatcctacctgtcacaccttaaataagttgaaaaaaagtaggttatcgcttgacaaaaaatatatattaattaataattcatatataattagaattattattgaaagcgaatatgctttctaatacatttttaggaggaatatacattatgtctttaatcggtaaagaagtacttccattcgaagcaaaagcattcaaaaacggtgaattcatcgatgtaacaaacgaagatttgaaaggccaatggagcgtattctgcttctacccagcagatttctctttcgtatgcccaactgagcttgaagatcttcaagaacaatatgctgctcttaaagaattaggtgttgaagtatactctgtttctacagatactcacttcgtacacaaaggctggcatgacagctctgaaaaaatcagcaaaatcacttacgcaatgatcggtgacccatctcaaacgatctctcgcaacttcgatgttcttgacgaagaaactggccttgctgaccgcggaacattcatcatcgatccagacggcgttatccaaactgttgaaatcaatgcaggcggtatcggccgtgacgcaagcaaccttgtaaacaaagtaaaagcagctcaatacgttcgtcaaaacccaggtgaagtttgcccggctaaatgggaagaaggcggcgaaactcttacacctagccttgatctagtaggtaaaatctaaggagtgcattcaattggtacttgatgcaaacatcaaagcacaattaaatcaatatatgcagctaattgagaatgacattgttctcaaagttagcgcaggcgaagatgacacttctaaggacatgctggctctcgttgatgagctggcttccatgtcatcgaaaatttcagttgaaaaagctgaattaaacagaacgccaagcttcagtgtcaatcgtgtcggagaagacactggcgtgactttcgccggtatccctctgggccacgaattcacatcattagtgttggcgctgctccaagtgagcggcagaccgcctaaggtggaccaaaaagtcattgatcaggtgaagaagatcagcggtgaataccacttcgaatcttatatcagcctgacatgccacaactgtcctgatgttgtacaagctttaaacatgatgagcgtgctgaacccgaacattacgcacacgatgattgacggtgcagcatacaaagcagaagttgaaagcaaaaacatcatggcagtgccgaccgtttacctgaatggcgaatccttcggaagcggccgtatgacgcttgaagaaatccttgcgaaaatgggcagcggcgcagatgcatctgagtttgctgacaaagagccgtttgacgttcttgttgtcggaggcggacctgctggtgcaagtgcagcgatctacactgcacgtaaaggcatccgcactggggttgtcgctgaacgcttcggcggacaggttctcgacaccatgagcatcgaaaacttcatcagcgtcaaagcgacggaaggaccgaagcttgcggcaagtcttgaagagcatgtgaaggaatatgatattgatgtcatgaaccttcagcgtgcgaaacgccttgagaagaaagatctgttcgaacttgaactcgaaaacggcgctgttctgaaaagtaaaacagtgatcctttcaacaggtgcacgctggcgcaatgtcaacgtacccggtgaacaagagttcaaaaacaaaggtgtcgcatactgcccgcactgtgatgggccattgtttgaaggcaaagacgttgcggtaatcggcggcggaaactctggtatcgaagcagcgattgatctagcaggtattgtgaatcatgttactgtgctagagttcgcgccggaactgaaagcagacgaagtcctgcaaaaacgtctctacagcctgcctaacgttactgtcgtgaaaaacgcacaaacaaaagaaatcacaggtgatcagagcgttaacggcatcacatatgtagaccgcgaaacaggcgaagaaaaacacgttgaacttcaaggtgtattcgtccaaatcggtctcgtgccaaacacagaatggttagaaggaacggttgaacgcaaccgcatgggcgaaatcattgtcgacaaacacggcgcaacaagcgtaccaggcttatttgctgccggcgactgcacagacagtgcgtacaaccaaattattatttctatgggatcaggtgcaactgccgccctcggcgcgtttgattacctaatccgtaactgataaaaaaatccgctatattgccagattggcaggatagcggatttttctttttctacagaaaaaacccgaaccaggcactccggtaaaagtgctcgattcgggccagcttcttataggtcctcgccattcgtttgaatgacatttttgtaccactcaaaggaatctttcttataccgcttcatggatccgtttccttcattgtcacgatcaacatagatcatgccgtagcgttttttcatttcgccagttgtgaaggagacaatatcaataatgccccacggcgtgtagccaattaaatcaacaccatcgtacgtgaccgctttttctaatgcttcaatatgcgattttaaatattgaatgcgttccggatcatgaaccttgccgtcctcctccagcgtatccactgcgccaaagccattttcaacgatgaataacgggatttggtaccgatcataaaaacgatttaacgtatatctcagcccggttggatcaatcgcccatccccagtcactcgaagtgatatacggattttcgacaccattcggcaagccgccattgacaatatcgccagtgttatcatttttcacatcgcttttcacagttgttgacatgtaatagctgaagcctaagtaatcgacggttccgtttcttaaaatctcatcatcgccgtcttcgaatgtgatgttgtagccttcgcgttcaaattccttcaacgcgtagcttggataataaccgcgaacctgtacatcagggaagaaatagcgctgcctcatttcttcttcagccagcatcacatcttcaggattggaggagaaaggataaatcggcacgtgtgataccatagccccgatctggaactctggattgatgtcttttccttttgccactgctaaggcgctcgccactagttcgtggtgtgccgtttgatacatgacctccttggcgttttcgttttcgccaaccacaacacctgaattcgtccataggaacaacggattgttcacatccatttggttgttgatctcgttaaatgtcatccagtactttactttatctttgtaacgggtaaagcaagcctctgcaaagttgacgaagaagtccacgactttccggtttctaaagccgccatattctcttgccaggtgcagcggcatttcaaagtgagacagggtaatgaccggctcgatcccatgcttcagcaattcatcaaacacatcatcataaaactgcaaaccagcttcgttcggttcagcctcatcgcctttcggaaaaatccggctccagccgatggacgtccgcagacattttaatcccatttccgcaaacaaagcgatatcttccttgtatctgtgatagaaatcaatggcttcatggttcggataaaactcgttctcttcaatcgtatccgtgatttttctcggcacgccatgtgcacctgctgtcatcacatcgacgacactcggccctttacctccttgattccatccgccttcaaattggtgggcagctaaagcaccgccccataaaaaatcctttggcatgtttcccatgtttaattcctcctcagcttacgactgtaaatattttttgatgcaatgcactttcctcaatctcttcaatgaaagctttaacaaactcatcgccttttttgacggtatcgccttcttttaccttcaaggaaaaaggcgtgccgtcaaatgtcaccgtatccagcccgatgtgcgcaagcaattcgacgccggacgctgaacgcagctttgtaggcgccaccatgacaaccgtaataacgccgggatggtggcatcgattttacgatatccttcgctttaggggtagaccgcttcagcaccaatcgaagtctggtagcgcagcgagaagccccaatcacattctcttccccgcctacggcctctaaaatgtcttttgctagtctcgtataatctctcacttccccgacatttcacccacccctttgatttggttgcgctttcattataattgtaccggtataatatatcaataccgaaacaaaatatttacgcactaactatcattgtaagcggtttatgctataattttggcagtgaaactaaacgaataaatgaggaatgcgtatgttaaaataccagcaaatcgcagcggaaattgaaacatatatagaagaacaccagcttcagcggggagacaaactgccagtcctagaaaccctcatggcccagtttgaagtcagcaaaagcacaatcacaaagtccctcgagctattagagcaaaaaggcgcgatctttcaggtcagaggaagcggcattttcgtcagaaaacataaacgaaaaggctatatcagccttctgtcgaatcagggatttaaaaaagacctcgaggatttcaacgtcacctcaaaagttatcgaactagacgtgagaaagccaactccggaagcggcggaaaacctgaacatcggaatggacgaggacatctactatgtcaaaagggtccgttacatcaatggccagaccctttgctacgaagagtcttactacaacaaatcgatcgtgacgtatttaaacaacgaaatcgtctcccactccatcttccattacatccgggaaggactggggttgaagattggtttttctgatttgtttctgcacgtgggccagcttaatgaggaagaagcggaatacttgggattagaggctggactgccgaagctgtatatagaaagtatttttcacctgacaaatgggcagccgtttgattactcgaagatttcgtataattataagcagtcgcagtttgtcgtacaggctaatagttttttgctgtagagctgcttcactatggaaggtggtcgacatgaacaaaatcatcattcctgcaatactagccatctttgcgctctggatattcttacagatttcactagagatgagcatcgttaagaatccaatgaactactttatcgtattcattatctttttcctctttgtaaagatggtgaaagaaaaacaataatagtttactttgaacaggaaaccagatttgacatctggtttttttgtgtttcactttattcatccgtttcaattgtctctaaaagcagttatgcggtactatcatataaaggtccaatgtttaaaaataatgtcatacttttaaattcaccttatcatgcacatgatcatatataggggtttattctaaaaaggggatggacgattttggaaagcaagtacctagatctactcgcgcaaaaatacgattgtgaagaaaaagtggtaacagaaatcattaatttgaaagcgatattgaacctgccaaagggcactgagcattttgtcagtgatttgcacggggagtatcaggcattccagcacgtgctgcgcaatggttcaggacgagtcaaagagaagatacgcgacatcttcagcggtgtcatttacgatagagaaatcgatgaattagcagcattggtctactatccggaagacaaactgaagttaatcaaacatgactttgatgcgaaagaagcgttaaacgagtggtataaagaaacgattcatcgaatgattaagctcgtttcatattgctcctccaagtatacccgctccaaattgcgcaaagcactgcctgcccagtttgcttatattacggaggagctgttatacaaaacagaacaagctggcaacaaggagcaatattactctgaaatcattgatcagatcattgagcttggccaagccgataagctgatcaccggtcttgcttacagcgttcagcgattggtggtcgaccatctgcatgtggtcggcgatatttacgaccgcggaccgcagccggatagaattatggaagaactgatcaactatcattctgtcgatattcagtggggaaatcacgatgtcctttggatcggcgcctattccggttccaaagtgtgcctggccaatattatccgcatctgtgcccgctacgacaacctggatattattgaggacgtgtacggcatcaacctgagaccgctgctgaatctggccgaaaaatattatgacgataatccagcgttccgtccaaaagcagacgaaaacaggccagaggatgagattaagcaaatcacaaaaatccatcaagcgattgcgatgatccaattcaagcttgagagtccgattatcaagagacggccgaactttaatatggaagagcggctgttattagagaaaatagattatgacaaaaacgaaatcacgctaaacggaaaaacatatcagctggaaaacacctgctttgcgacaatcaatccggagcagccagatcagctactagaagaagaagcagaagtcatagacaagctgctattctctgtccagcattccgaaaagctgggccgacatatgaattttatgatgaaaaaaggcagcctttatttaaaatataacggcaacctgttaattcatggctgtattccagttgatgaaaacggcaatatggaaacgatgatgattgaggataaagcctatgcgggtcgtgagctgctcgatgtatttgaacggttcttacgagaagcgtttgcccacccggaagaaaccgatgacctggcgacagatatggcctggtatttatggacaggcgagtactcctccctcttcggaaaacgcgccatgacgacatttgagcggtatttcatcaaagagaaggaaacgcataaagaaaagaaaaacccgtattattatttacgtgaagacgaggcaacctgccgaaacatcctggcagaattcggcctcaatccagatcatggccatatcatcaacggccatacacctgtaaaagaaatcgaaggagaagacccaatcaaagcaaacggaaaaatgatcgtcatcgacggcggcttctccaaagcctaccaatccacaacaggcatcgccggctacacactgctatacaactcctacggcatgcagctcgtcgcccataaacacttcaactccaaggcagaagtcctaagcaccggaaccgacgtcttaacggtcaaacgattagtggacaaagagctcgagcggaagaaagtgaaggaaacgaatgtgggtgaggaactgttgcaggaagttgcgattttggagagtttgcgggagtatcggtatatgaagtgagggatgtggggttcagggattatattctttgggcccatttttacaatcaactataaatcaacaaaaagcctctcaaaatagggttttgagaggctcactatcaaacatgaaaagtacttctattagtgttaggtcttatgacttgatctacattctcagcaatcgatttataattttgtttttttgataaacgatcataatccccaacaatataaaactctttttttgcccttgtaactgcaacattaattaaattaggctttgagcacgaccaatttgccgctccatcactattttgatctgtccccactacaaagtaaacagtgtcggcttcttttccttgaaaggtatgggtagttcctattgagcttcgagtccaatcatttactattttctttggtacatttaattctgctaaccgctttttaattgtttttctgagaccatctttcactgctgtaaagggagtaataacatataaatcaggagcatttaatgtattttcccatttttgataaatctcttcagcaactaaatctgcctgctcttttacaaactgcttattaaccgctactcccttacagtcaaaccattcgcttttcccttgtttttttatcgctaaaaccattttattatcataagcaatttgattagcgattgtaaacattggatttaagcatctcctatgaacccataaaggtatccctatccactgtcctttattgttatacattccaaatggattcgccgcatccgccagtgattgtacagaactccctatttcaataaaccgatcttcaataccataaaatttttttatatctcctaatattgttcgatcaatggtgacaactggttcaatctggattggatcaccaacaacgacaactttttgagacctccataatgcgcctgccgcttgttgcggagtagcttgtcccgcttcatctataaataagtaacgaataaaatcacgaccaactcctttatacattgttcgaacactggcaaaggttgtacttattacgggtgtgattaaatggattacaccccacatatgttgtaaccacattctgtgctcagtctgatttaaatctaacttacttcgataatttaacaaacgcaaacttgattttattgctttataattaaatatcaaaaacaatttgtggactttcattccctttaaaaaaagaagccctctttcaaaattcaattcatcagttagccaaggagtatgtaattgcctatattcatatgcactttgagaattggtccaataattatcatcgggtattactaacccctgatttttgcatttattgttgatagaatccctatatttctttaactccatccttatttgattcgatctcatctgcaaaagatcccattccttttcttcattttttattttcatagttattttttgcagttgatcttccatctgtaataatttgtttctttttgtatgaaatattctttgaaaaaaagttggtttagaaagcgtgtgaaactctctctctaacaaccgtttctgttgtttataatgagctgtctttaatactaacttttcttgttctgcctctagtaacaataactgattatttatatccttatattttttaaaaatttcgcataacgattgtagttctgctttcttttgtttaactgatttcaatgtttgttggaaatctgttactgcattcttccaatctgttaagcttatttttttattttctcgttctaattgctcgatgaatgatagttcaaattcgttattatttctataataaagttttttgtaatagtgagatatattttccgactttcctaaagatgctgagaatagtccccaagtatctgtctcttcacctagaagagcctttgccgcaaaaggaaacatcgataattcctctgcttctaatgcatatgctttttcataagaagaaaatacattttcatctgtaactttacgtataacttccttctttttaggaagatcttttgagatattttcaactgctccattattgcttgaagccactaccatagaatactgattaatagatttatcaatttcataaatagtataatgatagccatctaaaactaatttctttatttttttcagagctttttctgggttttcaaaacaagccattttttctgctttttcaaccatgagatttgcaaaaatatcttttaacagtgtcgttttccctgttcctggcgggccattcacagagcttatcttttgattgttatttataatttgatttacagctacttgctgcattaaggataatctatgttcaacaggtgacggccacctgccgttaggtacatttttaggctgcaacacatcttcaattaaaactctattttcatcaatgttcgttctattatcaaccccttcaataaattgccgtagtgtttcattttctccttgtgagataatatctcctaagtcctctaagaaaaagctatgaaaattatttacccgtccatcttgtccaaccttcaaaatttctttctcaaaataatgaagcgccatattatctattcgtaaaaaataccgttcatatactccaagtactttcttaagggctttttctgttactccatttacaaagatggcatcaacctgttcctcaaataatctcaactgatctcgaaatgtagtcatcaaatcatcatatggcacttcaagatgttcgtttattaatttcatcacatacataagtacaggtacaaatgcagaatcctttacatacttgcctgtatggtcaactaaaaaagacatactaaataacattttctgatctctattaatcatttcttcattattttggaatagatcacgtagatagctaacaagtttatgttgctcaaagcaacctaaatagtaacgaaattgaataaaatttttttcagagtccttcaactgatgcctctcccaaggcctttcagaaaaaagaacttgttctgttttctttcgttgttgaccatctaaaaaatggcttctactcaattcatctcctataccattgactccgcttggtgataaagcctcaactaagtgccatgcccttaatacagaatttacatttatcttccccataattccctcctatttttaacaacatcattcggttattgtcctcaattgatccaactggtatctgtaaaaaatccctaaactgattgatcagtctcttttctttttttcgacacatttgtttaaatattgaataattaactagatcacacattaaaattattagattttagaacatttcattttagtaaaaattcatgactgattcataaactctgagatcatttgttaaatttatgatacgatgacagtaaaaaagacataacaggggctagtcatatgagtgaacttgtgtttgaaaaaagagattttaatacagaacaaattcttgcgttgaaggcatctcgattagataacaatccgattgtatacattctttataacgaaaaaaagaagccgactgcatatattgggcagactgtgcaggctgcacgacgattgaaaaatcatttgagagacaagaagcgaataagtttaacgcgaaccattttcattggtcatgaaagatttcatcagtcagcttcctacaatattgagacaaatcttattaattactttattgccgaaaatcactaccaattgcaaaatgtcagtcagacaagatcgagagaaatgcatcattattatcaaaaagaattttataacgaacatctttttgaggaaatttggaatcagcttcggaaagagaatgttgtcagcgacacccttgaaaacctcagaaataaagatatttacaaactatctccgtataaagagctctctccccagcaggtggaaatcaaaaatgaaattcttgatttttgcaaggcgcatattgaaaaaccaggtaaccatgtcatttctatagaaggagatgccggaacagggaaaagtgtcttactgagctctctatttaacacgattcaggatttatctaaagatgaaaattcacatttaaaaaacaagaacaattacttacttgtgaaccatggtgaaatgctgaagacgtataaaagcatcgcaaacagcttaccaaatttaaagaaaaaaaacttaatgaagcctacctcctttataaatcaaatgtcaaaaacaggggaaacagctgatattgtattagtagatgaggctcatctgcttttaaccaaagaggatagatacaataatttccactatcgaaatcagctagaggaaatcattaaacgcagtagtatcactattgtcatcttcgatcctaaacaagtgttaaaaattaaaagctattggaatgaaaggttgcttgaggagatcaccaatcaatatcatgcgaaaacagtaaagctcacggagcaaatgagaatgaatgcaaatccagacacactaaagtggattaaccattttgtctcaaaacaattgctccctctgccgcaagaaaataatgataccttccaactcaaaatctttgaggaccatgccgactttaaagctgcaattgaaaaaaagaataatgaagtaggtctatcacgtattgtctcgacctttgactatatccataaaaaagatggtgctacttatatggtcgatgaggaaggcattaacatgccatggaattctacaaatgacaaatggacttgggcagaacatgcagattctattaaagaggttggttcaatctatactgttcaaggttttgacctaaattatgttggcgtcattctaggaccttctgtcagctataatagtgaaaaggatgagcttttcatcgacactgcaaaatataaagatacaggcgcattcaccaaacgagatgacatgtctgccgagaaaattaagaaaataaaggaagagattattctaaactctatcaacgtcctcatgaaaagaggcatcaacggtctttacatttacgcaacggatgtaaaattaagaaatagattgctagagttaaaaaggagaaggaaaaaatgagcgaaatcaaagatttaattaacacgattaatgaatttagagacgcacgcaactggagacaataccacaacccaaaggatcttgccatctctatttcaattgaagcggccgagctgttagaagacttccaatggaaaagcagcgaagaagcactcaaagcaaacgaggaaaacattcgtgaagaaattgctgatgttcttatctattcgctgatgctttgttcagatcttaagatggatgtgaaagagattattgaggagaaggttgtgaagaacggtcggaagtatccggttcaagggtaattatatttcttacaataattaaagcaatcttcactcctcaaaaaataaaagtgcatgacgatatatttttggaatgattaacaaatagattgattcttctgaatatattgtagctcaacttaccgctgagtgacagaaattaatcatagatactgagtttaaaatttactttggatttactaatgtaaattattaaacttaggattttattaaaacaggcatattcaagtatgcctgtttactactttaagaaagaagtaacctcattcacttatggtaaggctctccgtagtgtatctacttttgttctagttcttttaaaacctttaagtcttcataataccttaacaccgtactttgcattactaactttctattggcagaatctctaatgttacgaaatttctcattataaaacagagtaaaatcatgtattgtgctaaataaggttatgttagcttgtacccattctgataatgtctcatcagaaaaaggtaagtcatttgattcaaaaaataaactatccaacactgacgaataaggtgttacacttgcaaataactcatcttcaaaaatagtctcattttgatactcattaaataatgaaattatagattcagcatatgttatcatttgatacctaatttctttaactttatatagtacttcatcgttaggcttggtattatcaaaaataaaattactaattatcttatattggggataaaactcaaaatgaacaccttttattaaatgtttattagagcctttcaaactataccaataagtcttatcttgattatcgcttacccaagtagttttacaataataatttcctcgtaaaatatcactttcataaaaagtgaaataaatccatattatatctgatggacagcctttatatctatcttcttgtattttgttattatatacatcgcaaaacagtaatctttttttaatttttgttgagacgtctgctatttctgcatccgagaatggtttcttaagaagtatttttgccgcgtacctttttttagaaccatgatggacaggttccacactcttaatgatgtaatcctcgttttcaaggtaaatattatcttttttataaggagtatactctgaaattttaaaataaattgtacctcctatattagctctatatatagcatgctgaggtgtatccggattatttaaagtatgaatctcaagtaacctctttacccacaactgcaaatcataaagtgaaatttctcccttttttattaaaaatttattcgtcagtccatcgcataaaatatttgtaaatatacttccattgctccctccataagaaggttcaatagcgttactaccacttaatatcgcataaccgctaccttgaaaagattctatagattcttctaaattagtgctttttgtaccttcaactctaaaattacctgaatagcagcagtctataagcaatactttgcttttagctaatgactcgcctattttattaattatgtcctgagtacataataaaccatcgctaaaaacaatattatgaatttcactagaagtcccatgacctgagaaataaaaaataaatatatcatctttttgtaaattgccaataaaaagctcaagggcatgtacaaaatcgacgattgctacatgaccgttatttgtcatacccatttgaaaaatatccatatcatccagctgtaatccttctcttaacgctttattaacattaattatgtctgttttacaaaatggtaaatcaggtgcaccgatacctgaataatcactaactcctactataaatgcctttatccttcccatataaatcaccccagcttcacttgtttatctgattaagattgtaataatcatataaatagacaagcccaatttttattaaagaaaattgggcttgtctatattattctggttgttctaatcgtgattgaatgtttttccagtgtttcttcacttgtgtttccataagatttatagtttttgaatcttcatcaaatatcttctgtgctctttcaacgtaactaataaaattcccatgccctttcttactttttcccaagtgagagtagttcttatataattctctcctatacgatttacgaccgaatttttttgatttacgattgcatatccttactttacgatatgctctcgtataatacttaaaaagacttttttctctaattcgaacttctttaccattaaaactgaaccctagatagtctaatattgtctcatttaagtctaaatcgataatctgattatcgttataaaaataattccctgtcttctcaagttgaatttctaaatttggaatctgttcttttatatcttccaaaattttttgatgaatttgatagttatagtcttgaatgcctccttcaataggaataactataattaaatcatcacaatatcttctatatagcccattttgttctttaacatatttttgtatttttttatcaaagtccagcaaataaatattagaacagactgaactgatacccgctccttgaggaattccataccttttagaattcttgtaaatatttttatgcttaaatgctctaaattccttctctgtgaaatatttataactactttcaatttcactttcagtgtattttgtctttaattctgcttctatagtatctttaataaagtaactaaatcttgttatattcttgaagacattataataatcgtcaggtaaggtatccttttttagaacatagcggattttctctttaagatacctatgatccaatgtatcaaagaaattagtaaagtcagcaacaaaaatatatgcactttgctgcacttttataaaatcaataacttctttagcgaagttaatattactttttccagataagttattccgatatgcagttgcaacttcattaatacctagttcatctacaacagaattatagtggttatttagcttgtccccatagtacttatagatatagctatccatatgagacgcatagaaaattttacgaactttttcttttcgctttttttcttttctgctatatttttgaaatttaatttcaaaatgcataaacgggtaaaaaccatgtttagcaacccatcgagggttctggattttactcttaactttttcaattgattttttattatcaaggtgcttataaccctttacacgatactttttttcattcatatttggcagagctagcaggggtatgtaatcgtagcctattactctctatcaaaaaccctgctagcatactctcctttcgaattatagaccattgctagcctataaagaggctactgaatgcactaatagcttatactataatcagtatattaaattggttgtttatgacgattggaggtatccaaatgccaagttattcagaagcgttatcgattgtaatcgactggataagtattatgattacaattgagataaagcttgacagaaattcaccaatttccctcataactacttttatgaggcgttaaccatattaatattaccatctaaaatttaaatagtcaaaaaagtcaatcaaaagtcatgttttgacctaagatctgaaattaggtatcttgaaaaatataaaatatattatgtaaatatatgagttttttatttttagaagtcgatgatcttcaactgatttgggattcaattaatgatactcaactagttttccacccaatataggcatcaaccggatcgattgattatctgaaattagaacattttacgtaggaaaaagaagtttctttaattcttgatagaaacctttttagtagtttattgtctcttgctaaaaatggtgatctaaaagacactacggaaaaaagaatgattgcttttttaatgttatgggctcaattgaatggaggttccaatcagtgctggattagcaataatggaaaatgcatcaagatacaacgattcttgcaatgctaaaatagagctaaataattttaatgatattttcgatttttatccacctcagatttggttaaatttagctcgtggcacaatagaccagattccaaagtgtaactttttcaatattccatatgaaaactcaatcacttatcatgacactaatgatcacttcctaatgaattatgccagcatgttgcatttagttaatatatatcgagactctgacatggctcctttagaaaaattattagaagtcctaagttggaactttgacaatttactcatctctcaatatatcaatagatatcttgttatgttattttccaatcaaaatggtatcaaagcacctaaacacgctaatagcgatttattagaaagaattgaaaaaggttgtatgaatcaagcatgggatttaacctatctatcatgttggagtacactttactggaatgaatcaaaaacgcatgaggtttttttatttgctaccgccgataatctgttaaagaaaatttttattaacacacataatggtagagatttatttaatttaattaatattgcttttcctaaaagaagtgctgataaaatcattcaattctatattgaaaaaacaagaaacagaattttggggataatccaactcaatatttcaaatctttaattgagaaagaaaaaaagcatttgaaacaatctgtgggttgataattttcagctgtattacctaatgtcattccctttgttgtaaattcaaatatacaatacaaactttaatataaccaaaacagtccctcccccatttgttggggaagggactgttttggtatacaggtaaaatctcatctacttatgatacggctccccacgattaatccgaaaagcccgataaatctgctcaactagtatgagacgcatcaactgatgaggaaacgtcatttttgagaacgacagcttctcgtccgctcgcttcatcaccgcgtcgctcaatccgagtgatccgccgatgacgaaggtgactttgctttttccatatgtagccagcttatctattgtatcggctagttcttcggatgttttcatttttccttcgatggcgagggcgatgacgtggacgtcggggctgattttggataggatgcggtcgccttctttgtcttttatgattttcatgtcctggtcgcttaggttttccggcgctttttcgtccgggagttcgatgatgtcgatttttgcgtaggccgaaagtcgtttggtgtattcttcaatgccttgcttgaggtatttttcttttagttttccgattgtcacaatattgatattcacaggtcatccccactttaaaaacaagttattcatatatgttgtccacaattgtggatatcttttctgtattttgtgtaagatcattcgttccccactatatatactgcggggtctccacataattcacaggctgtggataaactgttagtatgttcgatttttctgatttcgggcggcagctcgtggtcgtctatgtacatatccagcaccgtttcgatgtgttcttcacaagaataatacgcttgtttcatgttcaaatcctccgatgttttcttccatttttacaaatgttctcttctcaatataacctatttattcacatgttagtagtgcttcgggctgagttttatccacaattcgacaaacaagctgttgatgactctatttcgctcgtgtgttagtttggatgtaaccgatgtgtgaggaggtctacatttgcgctttagatgggtttggctttttgtgatcatgttgctgcttgctgggtgtcagccgtcttattgggtgttggagaaggatcgaatcggtgaaggcagtccagacttagaaatatacgctaattaccttcaaatgcatgatgatgtaaaaggatatcaagtcttcaccatatcagaaggcaaaaaaatggtcgtcgtgtctctcggaagcagcgagaacgaaaaacagcttgaggtgtcagacgtcaaattctcacctaaagaaacgattgtaactgtgaaacgaaaacctgcttccaaagctaatgagaaaaacccttatattctgattggactcgataaaatcgaaggggatttaattgtccaagacgaaacaggatatcactttgaagaaacagattaccagcaataaagccggcgttctgagaacgtccggctttttcttttacttcaatgtcccatgcgggtcgatgacgaattttttggctgcgcctttgtcgaagtcgctgtagccttttggcgcgtcgtccagagaaatgacggtggcgttgacggcttttgcgatttgcgctctgccgctcaggattgctttcatcaaattgcggttgtatgtcatggcgggtgtttgtcctgtgacgaaggtatgggctttagcccagccgagtccgaagcggatttttagtgagcctgttttagcgtcggcatcctttgcaccgggatcttcggtcacgtataagcctggaatgccaaggctgcctccgacctgggtgacatccatgatcgagttcagcacggcggcgggcgcttctccttgattgccgtgcccagatgcttcaaagccaacacagtccactgcggcatcaacggttggttcacctagtatttgttcaatttgttcgccaaggcggtcgtgtttttgcacgttgaccgtttcacagccgaagcttctcgcctgtgccagtctgtcttcgttcagatcgccgacaatcacggtggaggcgcctaggagctgagcggagtgtgcagctgccaagccgacaggccccgctcccgcgatgtaaacggttgaacctgtttgcacgccagctgtgtaagctccatggaagcctgtcgggaaaatgtcggacagcatggtcaaatcgagaatcttttctagcgcctgttctttatcagggaatactaaaagctgaaaatcagcgtacggcaccatgacgtattcagactggccgccgacccagccgcccatatcgacgtagccgtaagccgatcccggccggtccggattgacattcaggcacacatgcgttttctgcgttttgcacatcacacagcgtccgcaggcaatattgaaaggaacggatacgatatcgccctttttgataaattcaacatcacgccccgtttcaatgacttctcccgtaatttcatgcccaagcaccaagccttctggcgccgttgtgcggcctctgaccatatgctggtcgcttccgcaaatgttggttgtaatgactttgagaataaccccatgctcacattttcgattcacattcgcctttgggacgccgggcccgtccctcaagattaactccggataaccgatatcctccaccgctacagtccctttgcctttgtacacaaccgctttgtttcctgtcaacgccattcctccctttcatgtgtttggacgcttggtccttgaacatgacttcggtttggcatgaccctttccctttctcacgactgttttttctgtattcttataacaacaaatatgccaagaaagcagccaataatggttccgccgatgtctaagaagtcgactttacatccatttaacaggaatacagtaatggccgaaaccaggctgatcataactgccagaagaataacccgtttggtgcgcatgtaattcctcctttagattcgtttctaaaccatacccaaaatcctctgcaaatttcggttcaacaaaaaaagagacttcacaccagtctcttcataattagagatcaattaaaaaatttcctgagaaataatgtgacaatactggttaccaacgcaatcgccgtatacataacaacccaaaacatgaatgagctattacccgaagctaacgtaaataacaatatcaagctcgcgataaggacgatgagcggtgccacccaaaatcttttaaataaaaaatgaccggctataccaaatacacctgcaatgatcggaaaaccaaaaacgataaataaaacggcgatagctcccatactaacctccttgccctaaaaccccttcatcacctcaacatcatacagcttcaaatgactcttcggcgtcacgacatcctttaccttcccaatctctttttctttcattttctttccggttttcagactgtactgttcaatgtaggcaggcttgttatacgtgtatgtgaagtaatagaggctgctgcctttttgggtgatttctttgaaatcggctttcattttgtcctgggaaagggtgaaggcgatgtttgtttttcctgtcttggcatcgattttgtgtacctttccgaagccgtcaatgaaatacaggttcccgtcataagggaaaaagctgtttttaaagctgaagggcatggagctgtatatcgtttgttcgtcgtttttgtattcggcgatgtcgtgcagctctactttgccgctttttttgttgatcttgaccatttgatagagattgcgggctttttggccgcgaaccataacataaacagcttggtcgtccacagcaagctgggattcgactgaggctccttcccggtactgccattccgatatcttgtggtaagtgagcttcttttgatctgcttgaatctgaaggagctcatagcctttttcgtcagctgtcgggacaagtgcgtaaatggcgccatcatggaaaccggaggctcggatgtagtaggggatgacgtcttttttccactctccgtctatttggcggtacagctctgagcggtatccgtctttctttttgtcgtagccggagttgtataaggtgtaaaagccgtccgtgttttgcagaaagcctgcgctgtcgcctgtgtgctgataggttcttttatgagatctcaggccgtctttaatcgtataaatcttgtttttgtcctccagcatcacactgtcgccgtgaaccttggctgatcccagctcaaggcccttcatctgaaatgaagacagcgacccgtcctggctgataaacaaggcatagcttttcccaccgccaaatgcatcttgatccgcagaggttgaaaaatataacaggacttctttgtcatccaagaaaccggagtctcgaagatcctggtgacttacagttttatggctaggagaaatgaagacaaatagtgcgattcctgcgagaatcagcatggcgatggtaatcatccactttttcatatccttctccttagtaaatggtcatgatggttgtcgtatacgaagaacttgtgatgtcgcgcggatacacgcctaagcctccgttgctgtctatatcaatccctgcttttagcaaaaaggcagaccataggagctttgaacagtttttggcgccgtcatggcccgtatttctgttattgacgaagttaaatgagtatgggtcgccgacttttgataccgcccagtcggcagcagctgttttttgagatgaggatacgctgacggtttgcacaatggagttgtcttccacgtctctggcattatacgcgatctgcctgacgccgtcgctcgggacagattcaacaattttgtcagcggcggagtacatgccgacgtggccatgattgtagtaggctgtgtaggagttcgtgtaatagatattgcctttcgcgcttgtcgggagttttttcgtgccggacgacccgcccatgatagacatgccgctttccttggcgagccggtctccttctgctttatcagccgtgatttccttatagaactgttttaggataacgtcctgctttacgtgctgctgtttggcaatctggctggcagatttcatgatttcttccggtgtcgtgcctggctgcagtgcggcgatttcttcagcataatttgtgttctttacggctttggcgggagaaacgaacaggccgccacacattgtaagcgctaccaaaaacatcgacactcgtttcttcaacttcattacatctcctcttttcttgtgagtgtaggaaagggaatttcctcacccacattatattaggaaaataaggaaagtaactaggttatttacagaatttttagaaatcgtttacagaaaaaggcctttatcaggcccttttcgttaaatcttcttgctcatcactacgtctgtttcttgaaatccggtttgctcatatagctttcgcgccgtctgattatgggcaaagacatgaagggacagcttgcggattcccatgctgcgtgccgtttgatctaatgccgccaatgcttgctttgcgtagccctttccccgatacggttcatataacccgaaatcataaataaacgcttcctgctgcggatgctccggttcagcatgtatccagagccagccaacgatatccttttcattcagcttgaggctccacaaatggtgatggggtgtttccagccctctcggaagcagatcagtaaacgcctgcttagacaaaagctgtgcatcttcaggcagccatgttcccgcttttaccttttcttccgcgtaatgctttgttgtgtacgtgagataagaccgaaattcttctgtctgcattggggtcagcatgattgtcatatcatctctccttcatatattgactagaggattttacataaaatagaaagaggtgttactatcagaataagcaactgagattgataagtcactagagaaaggagtttcacatgaataagatcgcacccgcagaaatcgctagcatgctcaacgattggtaccttgccatcaagaaacatgaagttgaagaatcctcccgtttatttgaagaagtgaagcctttattggacgacatggaagaggatcaggaggtgctggcctacttctccttattggaactgcgccacaaggttttgcttcacgaggcgagaggacagggctttcagcatgaggagccttctcatatgaatgctacgtctgacatgctgaaatattacttttttctgtttgaaggcatgtatgaggcctataaaaataattatgacattgccattgggctgtataaagatgcagagcagtatctcgacaacattcccgatccgattgaaaaagccgaatttcacctgaaggtcggaaagctctattataagctgggacaaaatattgtatccctcaatcatacacggcaagcggtcaaaacgttcagggaagaaactgattataaaaagaagctggcttcagccctgattaccatgtcaggcaattttacagagatgagccagtttgaagaagctgaggcttacttggacgaagcaattcggatcacgagtgaattagaggatcatttttttgaagcccagcttttgcataacttcggccttcttcatgcgcaaagcggcaaatcagaagaagcggtttcgaaattagaagaggccttacagaacgaagagtatgcccgctccgcctattattatcattctgcctacctgctgatacgagagctgtttaagatcaaaaagaaagaacaggccttatcttattaccaagacgtgaaggaaaaattgactgctgagccgaatagaatatgtgaggcaaaaatagacattttatatgccatttatgcagaaggaggtcatgcggaaacgtttcacttatgcaaacaacatatggatgacttgttgtccgagaaagagtatgacagtgtaagagaactttccattttggctggcgaacggtatagggaacttgagctttacaaagaagctgcccactttttttatgaagcattacagattgaagaactgattaaacgaacggaggttatataaatgaaaagatttctgattggcgcaggcgtcgcagcggtaattttatcaggttggtttattgcagaccatcaaacccattcacaggaaatgaaagtcgctgagaaaatgattggataaatgaaaaacccccgcgggtgcgggggttcaatttaacgaaagaatcctaaaacggtttgtagttttaggattctttcatcttttcagcgtgattgaaaacccttgaagtctaggaagaacgagcattggagcgcagcgaatgtttggaattcgtgagcaccgaagcgcaggcctgacaacgaatgcgagggtttgtcgacacgctgaaacccccgcgggtgcgggggttttcttattacagcagcttcttccctagcagagattctacgagctctactgctgttttacccgttttgtttttgtgatcaaggatcgggttaacctcaacgaattcggctgaggtaatgatgcctgcgtcatacagcatttccatagccaaatggctctcccggtagctgatgccgccgacgacaggggttccgacacccggtgcgtcgttcggatcaagtccgtccagatcaaggctcagatggacgccatcacatgctgataaataatcaagggtttcttcaatgacctttgtcatgccaagacggtcgatttcgtgcattgtgtacaccttcatgccgctttccttaatgtacttgcgctccccttcatcaagtgaccgggcgccaatgatgacgacgttttccggtttgattttaggcgcgtagccttcaaggttaaccagtgactcgtggccaatgccgaggctgaccgcgagcggcatgccgtgaatattgcccgatggtgaagtttcaagtgtattcaaatcgccgtgcgcgtcataccagatgacgccgagattatcgtaatgcttcgctgtgcctgcaagcgtgccgatcgcaatactgtggtcaccgcccaggacaagcgggaattttttctcttcaatgactttgttgaccttttgcgcgagtttttcatttcccgccaaaacggaattcaggtttttcagttcctcgtcatttttgattttttcgcggttgatcggaatgtcaccgagatcctcaaccgtataccccatgtctgacagccgctcgatcagatgagcgtaccggatggcactcgggcccatatctactccgcgtcgtgcttgtcctaaatccattggcattccaataaccgaaatcgttttatccatctgtgattccacctcaacatttaagataatgtcctatgcgggttctaacaaagatgacttacggacaacgttttaaagctctagctgacgattcgcctgctggcgttttttaatgacgacatgataaatgatgtagcaaatgatcataaacggtacgccgcaatacagcgcgatacgctgctccggatcaaatgcgagactgatgagcacgaccgtatttaacgttagaccgatcagcggaagcaccgggtacagcggtgttttaaatttcaaatcttctatcttcccgccttcgcggatatatttgcgtctgaacatgatttgggaaagcgaaatcgtaatccagccgacctgtgcgctcatacccgccaaagataacagtaccatatagacagtttcagcctgcgcaaactttgtcagaagtgataggcaggccacagccatcgttacgattaacgagtacatcggtacaccgcgctgatttgtttttccgagcgctttgaaggcctgtccttcattggccattgcgtacagaatacgcgttgatgcgtataaacctgagttcgcaacagataacagtgcgattaaaataacaaagttcatgatatcagctgcatatgggattccgatttgctcaaatacggcaacaaatggactttccacgacacccgcctgtttccacggaatcatgccggcaatgacaatgattgaaagcacaaagaagacaagcgttctccatactgtctgtttgattgaccgtggaatcgttttttcagggtcttcactttctccggctgcaaccccgatcagctcagtcccctgaaacgcaaagttcacagtaatcatcgtaatcagcattgcctttatgccgttcggaaataacccgtcttcataaaaatgtgtcaaaaacggcgcctgctctccgcccttcagatcaatcaggccaaacatggcagctccgccgagaataataaataaaaggataatcaaaattttaatgcctgaaaaccagaattctgattctgcaaaggcttttgtggtgattgcatttaaaataaacatcagtgccgcaaagaccagacaccaaatccacacgtctatatgcggaaaccagcgttgcatcagctgccccgctgataaaaattcaatggcgcatgtaaccgcccagccgagccagtacagccagccgaacgcaaacccgaaggccgggctgataaattttgtcgcataggtctggaaggatcccgacacaggaaaggcgactgccagctctcctaagcagagcatcgtcaaaaacatgataaagccgcccactaaataggacagaaccgcgccgagcggtcccgcttggttaatggtaaacccggttccaaggaagaaaccggttccgatcactccgcccaatgaaatcatgaacaagtggcgcgatttcattgtccgctggagctgatttccgttatcttggtttgtattcacattctgcaccccttcagcaacttgtattggatctaagctggaacatctgcatggtgctatcccagtttgctgtccaaagagcctctatctatttaatataaaattcacttcttctcataaagatacattatactaaaatactgtagctgagcaaatagggagtgctgatttttctgttgtaaatttatacaaacgaagtgaatatcccgccatggtgcggatttatgcgttttgcagcacgtgcttaattttctctatcgcccaatccaaatcctctttggaaatgattaatggcggtgcaaaacgaatgactgtatcatgcgtttccttgcataaaagcccttcttccttcaaacgctcacaatacggacgtgccgcttcagtcaattccacaccgataaacagccctctgccgcgaacttctttaataaccgggttgtcaatgctctcaagctcgcttttaaagtattcgccaagctcaagagaacgatccgccagcttttcatcctccagcacttctaatgaagcgatagacactgcacatgcaagcgggtttccgccaaatgttgagccgtgtgagccagggttaaacacgcctaggatctcgcggtccgccgcaatgcatgagatcgggaacacaccgccgccaagcgctttgcccaagatatacatatccggaacaatgccgtcccagtcacaggcaaatgtcttgcctgtacgtccgagacccgtttgaatttcatccgcaataaacaagacattctcttccttacaaatcgccgccgcttcctgtaaaaatccttccggcggaatcacaatgcccgcttcgccttgaatcggttcaaacaagaatgccgctgtattcggcgtaatggcctgtcgaagcgcttccacatcgccgtaaggaatgagtttgattcccggaagcatcgggccgaatcctcgtttatattcctcttcagaagagagagataccgccagcatcgtgcggccgtggaagttcccgacacatgcgataatttccgcttgattgtcagctacgcccttcacttcatacgcccagcgtctcgccgctttcaccgcagattcaaccgcttcggctcctgtattcatcggcagaatcatctctttgcctgtcagtttggctgttttttcgtaaaacggcccaagctgatcgttatgaaacgcgcgtgacgtgagggtgattttatcagcctgatcctttaatgcctgaatgattttcgggtgtctgtgcccctggtttaccgcagaataagcactcagcatatccatatattcattgccttccgggtcctttacccaagcacccagcgcttcagaaataacaatcgggagcggatgataattgttggctccgtaatgagacgtctgatcaataatttctttggatttagataaagctggcatatttgaattcccccttgttttctgtttcaacatgttatcctgctttccctttatataaatgcaagttctgtgccaaatcaagaattcgtgtgttttctacaattttcgaggacaaggtgcaaaaacattctgatatttcgagcaaaaatttcagcaagtgcaaaattcttttgcataccctctccatttttttataaaatagaagcaatattaagaaaactgagggaggttcatacagtggtcaaagacagcgaattcctcacattggtttttcagagcattttagatgaaatcgatgttggcctgcacgtggtagacgagcatggaaacacaatcgtatataacaataaaatgatgcagattgaagatatggagaagcatgacgtcttgaataaaaacctgatggatgtgtttatgttttcaaagcagcaggacagcacactggtacaggctcttcaggaaggaaagacgattaaaaacgtcaaacagagctatttcaataataaaggccaggaaattacgacgatcaatcatacatatcccatcgtccaagacggcaaaatcaggggcgccgttgaaattgccaaggatgtgacaaagcttgaacggctgatcagggagaatatgaacaaaaaaggcagcacaacctatacgtttgacagtattctcggcaccagtccggccattcaagacgtcatcgaaaacgccaagcgggcaacccgtacgtcatcatctgtccttctcgcaggcgaaaccggcacaggaaaagaactgttcgcgcaaagtatccataatggaagcgatcgttctggcggcccgtttatttcgcaaaactgtgcggcattgccagacagccttgtggaaagcattttgtttgggacgaaaaaaggcgcgtttaccggcgctgtcgaccagcccggcctgtttgaacaagcccacggcgggacgctgctgttagatgaaatcaactcgctgaatctcagccttcaggcgaagctgctgcgcgcccttcaagaacggaaaatcaggcgcatcggttcgacaaaggatacaccgattgacgtacgtattattgccacgatgaatgaagacccaattgatgcaattgcaggcgaacgaatgcggaaggacttgtattacaggctgagtgtcgtcacactgatcatcccgccgctacgggagcgaaaagaagacattttgcttctcgcgtcggagttcatccagaaaaacaaccatctgttccaaatgaatgttgaacacatcagcgatgacgtgaagcaatttttcctttcttatgactggccgggaaatattcgcgagcttgagcatatgatcgaaggcgcaatgaatttcatgacggacgagcaaacgattacggcttcccatctgccctatcaataccgaatgaaaatcaagccggctgacattccagagcctgaaacaccaagacaccagccggccgcggacttaaaagaaaaaatggaaagcttcgaaaaatatgtgatagagaatgtgttaagaaaacacggccataacatctcgaaagctgctcaggagcttggcatcagcagacaaagcctccaatatcggctgaagaaattttctcactcgtctaacgaataatccggagcaggaagcctgatcagaaaaacagtgcctctgccgatttcacttttcacttcaatcgtcccattgtgattgtcgataatcgatttcgttatggcaaggcctaatcccgaacctccatatttccgggagcgggatgggtctgccctgtaaaatcggttaaataaatgcggcaaatgctccggcgcgatgcctgtgccattgtctgctatcatcagcatcacgccggaactgcctttttgcagagaaatagtgatggcaccggttctctcatttgtatactgcaccgcgttataaaccaaattcagaatgacctgtttcatcttatcccggtcaaacaccgctttagcatcatcctcaagcagcagctgcagccttctttcttttgcaagcagactgagctgcggctccatttcccttatgagcgcatcgagatttcctctcttcatttcaaagctcggcacccgatcaatttttgctaaaaacaacagatcctctatcagccgagtggctctcttcgactcttcatacatactattcagcgccctatctctctgctccggctgaagcgcggcgccacgcagcagcacttcgataaagccgtgtatggacgttaaaggcgttctcaattcatgtgaagcgtctgatacaaattgccggatgcgctccttcgcctctttttctgctttaaatgacgtttcaatccgctccagcatgcgattaaacgaaatagcgagcgtgtcgatttccatttgttttcgatatacaggaagccttttattcaaatttcctgcattgatttctcccatcatatgtaccatttgtgataacggtttaagcgtatgtctgaccacaggcaagaacgtgaaaagcccgagcaggagcgcaaccagcgagagcgtggaataaatgctgatttgccggagcagtacgtccttcagtggttctgttaaagtactcatttggatcacgcctgcttcttttccatcaatagtaatagcctgaaacacaatcagcacttcctcgccggattcatttttcgtgattttgtaatgcaaggccatcgtatcttttaatgcctcatcatatacactttttttcactgttggcggtgctcccgcatatggatcggtcgacaataccgtactgtcttttgttttcttatcgataaaaacaatggtcacgcccggatagataaaggcgggacggacagcaccatctgacttttccgagctgtcgggatggcttttgtatgttttaatattattccagatggttggctccgttgagttgatataactttgaatgctgacagctcggttttcatataagaggcgttttccaaacacatattgcatagcgccgacaaacaccaatagaagaacgagaatgcataatgaacggaataaaagctgaaagcgcagtgttttgaatcgttttttcattcaatatccacccgatagcccgcaccccgaaccgttcggatcacttcatgctttttgtcattcaatttttcccgcaaggaacgaatgtacacttcaacaatattctcttctccgtaaaaatcatacccccatactttatccagaatccttgctttactgagcacaaggccgtgattcagcaccaaaaactttaaaagctcgtattctgttgctgaaagcttgagcacctcttcctgatagcggatttctctgcgccgatcatcaattcgaaacggaccgagcgcgaattcttcaaacaggttgggaaagtgatcccgaattctcgcatagattcgcgccagcagctcttcaaagctgaagggtttgatcatataatcatcagcgccctctgtcagcgcttttacccgaacccccacctcatccttggccgtaagcataataaccgcggtatggccggtttttttcatcatcctcgatacttccagtccatccattccgggcatcatcacatccaagatggccacatgcggctgaaatgtctttacggtgttcatcgctgtcattccgtcagctgctgtcttcacttcaaagccttcattttcaagacccattgtcaaaaaatctaatatcgccggttcatcgtccacgagcaaaatcttgatgcctttcatcctattcatgctgtgctctctccttagttggcataaacctctgattagttttttcccttcccctcctattattcgtttttacctgaaaacaaactgaatcttccctaaaaatcagctgaattcagcaagttttcagccagccctcatttgattttcagcttcggcctatacaattgccttagttggtacagccaacaatgaaataaaggaggaatctcacatgaatatcactaaagttttatcaggagctgcactgggaacgattatttcaatcagttctttcacttctgctcacgccgctgtcattcaaaaggatgatacatcaacgaaggttgagacgaagcaacaggcttccatcacaatagcaaaggcaaaacaggttgctttgaacaaatgcaaaggtactgttcaatcagcccaaatgaagaaagtgaatggcacatacgtatatgttgtgaaagttctcggtgaggacgacaaacagcatacgatgaacgtcaactgcaacagcggcaaagttgtgaaacatgatgttcaaaagaaacaaagctatatcagcaaaacaaaagcccaatcgatcgctttgaaaaactgcaaaggtgcggttcaatcttctgagctgaagcaagaaaacggtgtttacgtttacgtcgtaaaagtaatgggtgaagacggaagccttcacacgttccatatcaatggagaaaacagcaaagtcgcaaaacacgagcaaaagaagcaagcacatctttctaaaacaaaagcgcatcaaatcgcactcaacaaatgcaaaggcgcagttcaatcttctgaactgaagaaagaaaacggcgcatacatctacgttgtcaaagtgcttggcgaagatggaagcactcatataatccatgtcaactgtgacagtggtaaaatcgtaaaacaagaagtgcaaaagaaaaacgcagccgttacaaaaacaaaagcacatcaaattgcactaaataaatgcaaaggcacagtgaaatctactgatttgaagaaagaaaacggcacattcgtttacgtgattaaaatcactgcccaaaaccacactgaacaaacagtgaaagtgaatgctgaaaacggaagcatttgcaaataaaataaactgcctgccagcagtaaaataactgaaattcaacgtataacaccagtcttgttttaacacaaagttctaagttcatgtctacctttttctaaatactcttttaaactgaacgtgcgtgacccgcgttcagttctttttctaaggaggacctacaaatgaatatgaaaatatgttctgcagctgctttaggagcgatcatttcaatcagttctttatcatccgcacacgcggctgttctgcataaagaagacactgctaaagttcaaacccagcagcaggcttctattacgctctctaaagcaaaaactgtcgctttaaagaactgcaaaggcgcagttcaatcagcacaaatgaagaaagcagatggcgtttatgtctatgtcattaaagtgcttggtgaggatggcaaaattcacacctttaacattaaccgcaacagcggaaaaatcgtcaagcatcacgttgaacataaacaagccgcgatcacaaaagcaaaagcacaaagcattgcgttgaacaaatgcaaaggtactgtcacatcttctgcattaaagaaagaaaatggcacctatgtgtacatcatcaccatcacagccagcaaccacacggtacaaaccattaaagtgaatgctgagaatggaggtatttgcagttaacagccatttgctgctgtttcacgtgtaacatccatcttgtatttttcttcatattcgatatatccttttcaactgaacgggcgtgacccccgttcagtttttttgcatatcaaaacagcctggcaaacgatgccagactgttttgattaacttcctaattggtctgcggaggacagcttgatgtctacagatttttcttttccgccgcggtaaaacttcaccttcacccggtcaccgacttttttctgataaagccgttttcgcaggtcaacaatatcatttactttgtatccgtcaaatcccgtgatgacatccagttccttcagccccgcttttccggcaggtgaaaaggcgtctacacccatcacaaccgctccattggtaacatgcttaggaagctttaatgtttcatcccaatgatagcttgcgatgtcgcttagcgatttcatctcaatcccaaggaacgggcgtttgacctttccgtatctctctaaatcctctatcacagggatcacgagcttagatggaatcgacaggccaatcccttcaaccgccgactcggcaattttcattgaattgatgccaatgaccttcccatccatatttaacaaagcaccgccgctgttcccagggttaatggccgcatctgtttgcaggacttctgcgttccagtcaggctgtccatcaccgtttgaatctactgggatcgccctctccgtacccgagatgacgccttgtgtgacagagccagcaaactcaaggcctaacgggttcccgatcgcaataaccggctccccagacttcactttatctgaatttccgaaatcggcgactgctttaattttatcgcttttcacccgtaaaacggccagatccatcagctggtcgctgccgacaagatcagctgatacacgtgagccgtctttcaagctgatttcaatttgggaagcgccttcgatgacatgatggttggtcacgacataagcggaatggtcatttttcttatagatgacgccagagccgctcccagcctcgccgctctctccccgtatatctgatttttggatgttcacaacaccgacaacggcgggcgacacattgctgacaatcttggtgaccgtattgttgacactgacattcaccgtcctgattgattcccggccgttattgttctgctgctgatctaaagcgcccgtatctagcccttcatttgaaaggtacggcatgataaacgccattaatacggcaccgacaatcacgccaatcaggcttgaaagaaaatatccttttttgcttctctttggctgttcaggagtagtatgttcttcctcacgttcgtaatccaccatattccatcctttccaagaacgttaatatggttatattgtgggttagaagctcctagaatagtcatgatttacatagaaaaattatacagcgcaaagcggagtggccttcttcggatcagtgtcgtataagtcaaatgtctcacccgtcacaaatcctttagaagccaatgtctgctgcacggacattcttgccagctccttcatgttgttgtcctggctcaaatgcgccaggtaaatacgagacgtctcatcgccaatgacatccgtcatcgccaaggcagcatcttcatttgaaacgtgcccgacgtcacttaaaatccgccgcttaatgctccatgggtatcttcccatttgcagcataccgacatcgtgattgctttcaaacacaaacacattcgctgaacggataatgcctttcattcggtcgctgacatatcccgtatctgtcattaacgcgagctttcggccgttataatggaacacataaaacatcggttccgccgcatcgtgggagacgccaaacgattcaacatcaagtccgccgaacgacttcaccgtctccatcggaaatacaaacttttgatcggtgtcaattttgccgatttgattctccatcgctttccaagtcttctcattcgcatagatcggaagcttgtactttctggcgacgacaccaaggcccttaatatggtcactatgctcatgcgtcacaaaaatgccgtctacatcatccagcttacgcccgatctgcgccatcagcccatccatggcttttccgctcaaaccggcgtccactaaaaatgcgtgatcctctgtttcgaggtaaaacgcatttcccgtactcccgctcgcaagtacgctaaattgcaagctcatgtttgtctcactccattattttcattgatctgtatctaaaatcgtactctccaaagcattcacagtaaaatactcttgtactgtctttttctcaccgttcacttttttctcgtactcgaccgtaattctccataccggcgccagcacctgcgtacttgtcagtggatattgtgctacatagccgaatttacagctcttcacagtgctgtattcttttaattgattttgatagtacaatagctcaaccgcatccatttcagtaattaagctttctttctggatttgcttgaaggtctcaagcgttgtctggtcgtacgacacaacctcgtttttaccgtttaagtgcaataccacttgcccgatcatattagcgggattatcggtcttttggtaaatataatggccttcgtacgtttggaagaaaataatttctttcttcgatttattaaccttccaaagcttatatttttcgccatcttgaatctttgaagaaacaagtgcctgagcatcgtcctcgatatccttctttgatagggctattggatttgcaaacttcattttcaggctcgttactttatgatcatcactaggcatgtccatcaaaggcttttgatccttcagcgcctcaatttcctccttggtgaaggctttttgatttgccgtgatccgatagccttctgtcgcttccttattcaagccttcatacgtgatatgatcggccttcatgtcatgctcgacatcatttttaatgacttcatattctttgccggtagcctgccatttttgaaaaaactgatagcctaagaaaatatctaaaatgaggaaggcaacgatgaagattgattttgtcttattccactccactgttagccccctccttcctcaataaatcctttgtaatcggcacaatttttccatttactttcatcgcccaaaccggttccagttcaacgagaggatcatcgttggttgatgttgataccaattgataagcaaggaagatctgatcaattttgtccgtatcataagcggtttgtttcgaaagcagcatcctcacttcgctgccgctcatgagctctgtttcacttgttttaatcggattcgttccgagactgtaattcggccgcttatagctgagaatatcatcattcgcccattgcaccgtaatcgccgatgtcgccccgaaaggtttggtggtgctgttaatgaccgggatctgatccataaagatatagaaactcagctgctggctgtcattgatactgaaaaattgatagtgatccgtccagcttccggtatcctcaaggtatttttggctctttttgattaattcacctgtttgataggatgtgctctgcaccaaattgcgctgttgaaattgcacctgtcgctggcttagattcacatctaaacggctgatcccatctgtcagcacatttctgttgttgtaattcgaatcttctcttacaatgctcggatcactaaacaaagcctgcttaaaggtatttgttttaatcgattctgtgacaaattcttttttgtccatcgtaagcggtttgttcggcagcaagaactctttctttgagccaatggagaacaaactgaacgccggcatatttgattgcctgtttttcaagtcgttcataatgttccggtagtttgctgactcaaccgtcacttcaagaatgagctgtttgctgtaagacaccaaatagattttcttgttcgcttttgtttcattgaacgggatcagaatatggtcaaacgaactgtattcaaacgactgattagaccatttaaacagcgtttggaaaatatcaatcggaatcgtatcgctgaattgcaagtcaagcttggcttcagaaccgcctattccataaaaccagcttttgaatccagccttgtcatactgatccgaaatatctttaattcctttcacatcccaatgtggcaagtcagaccaaatttcttcatagagggcattgtcatccactttgtaatgagcgccgtcatcatggataaacatgtcccttggccttaccgtttcagacagcttttgagtggttttttcgattttatgtttcacacgaacagtagactctgttgaggatgagccttcagaaaagtttggctggaacgtccatatcccccatgtaaaaacaagactgatgacgacgagtaccgtaagtaatatcgtttttatattttcacgcttcatcccaatcatcctcttgttcctctttatatggaagagtaaatgtaatcgtcgtgccttttccttctatgctgtccgcccaaatatctccgccgtgcgcctgtaccatttccttggcaatcgccaatcccagaccggtgccgccaagttttctcgttctcgctttatccaccctgtagaagcggtcaaagactttttcgacatcttttttcggaatgccgatcccttcatccttcacgctgatatagagaagttcttcctcttcattgacatcaatcgagaacgtgacatgtccgccttccggtgaatattttaaagcgttagaaataatattatcgagcacctgcgtaattttatcctggtcgatctcgacgtacagatctctgtccggcagattgcggataaactccacatgctgctcttttgtcatttcaaaacggtcaataataagcgacataaaccggacaatctgaatccattcccggttaaattgataatccttactgtcaaatttcgacagctgaagcagatcattgacaagccggatcatacgctctgtttcattttgtgtcaccattaagaagcgcggagcaatgtctttattttcccacgcgccttcagctaacgcttctaaatagctgcgcattgtcgtaagcggcgtccgcagctcatgtgatacattcgcaacgaattctctgcgttcctgatccattttctcttgttcggttacatcgtaaatgacagcgattaaaccatcaattttgccgtgttccctttgaatcacagagaaattcacgcgaagcaccgttaattcatcatcgcgctcaatttcaagcagcatagaatcctgctgctccactaaatcttcaaaagtataattctcttgaagccccagcaaactcgtaatcggcatttctaaggctgtttcacgtgaaacgttcaacagctccagcgccgggctgtttaagagaataatcgctccatttcggtttgtagcgattacgccgtctgtcatataggcaatgacagaggctagctttctgcgttctccttcagtcatcgcctgggcatcttcaagctctctcgttaagtggttaaacgttgtggccagctgcccaatttcatcatgcccgtactttttaaccttcctcgagaaattccctttcgcaagctccatcgcctgctttcgcatatctgaaagcggatgggtaatggttcttgccagaaaaataccgagaagagccgtcaaaacaagtgccaaacctgtgccggacgccaatatcgtgttgatcgtcttcatttgattaaagacatcttccatactcgcgacaacatagatcgcgccgacaacctcttggttttcagtcatgacgggcttcgcggaaataagaactctgattttgcttttcgggtcataatattttcttaaatacgactgtttggtagaaaaaattcttttgaaaatcagatcggtcgtttgtttccctgccacttcctcaccatacggctttgaagaaccgaccacttcatagcttttatctacaaagctaatttcccgaacctcatcacttttcgtgaagtcattcaaaatacggctgacgtcatcctttatgacggtgctgtcgttatcgctcttatattcttgttcgatataataagaaaggttgtcgattcgctgattcagcgattgttcataagagctgatcagcgacttctctacctgattgacaaaatacacaccaatgatttgcatggcaatgataatcaaaagtacataaatcaaggtaatcttaaattggatcgaccgaaaaaaaccaaccttattcatatggtcattagtcctgttctgggtttctcaagtaataacctacaccgcggcgtgtgacgatccaatttggatggctcgggttgtcctcgattttttcacgaagccggcggactgttacgtcaaccgttctgacatcgccgaagtaatcatagccccaaacggtttgaagcaaatgttcacgagtcatcacttgtccgatatgttttgctaaataatgaagcaattcgaactcacgatgagtcaattcgattgtttcgtctcgttttgatacaacgtacgcgtcagggaagatgacgagagagccgatatgaatctcgttagaggaaggctcttcctccgcaggcgctgttgtcagctggcggcgcaggttcgcttttacacgtgccaagagctcgcgtgtgctgaatggttttgtgacatagtcatcagcaccgatttcaagcccgataaccttgtcaatttctgaatccttagccgtcagcataatgattggcatatcgtatttctttctgacttcacggcatacttcaacgccgtctttattcgggagcataatatctaaaagaattaaatcaggctgaagctcttctaccatttcaacggcttcgtttccgtcgtgggcacagtgcacttcatagccttcttttcttaagttaaattccaatatatctgcaatcggtttttcatcatctactacaaggatctttttatccatcattttgattttcctcctgccgaatgacttcatttcatctatataacattcgtttcatcacttatggcccatgtaaagaatgggtccttgtctattataacggtttaaggtcaaaagataaaaaaaataaaggtttagaaaaaaaacacatgtttcacctttatcgccagttgtttatctattgtcatgctggtcaactttttttaaaaaagataactttattgaaacctcccttcaccggagtgcgtctttatcaatgacgtcttcttctttgaaccggccgcagggccggttctccctttttcttctattataacactcctcatgtttgcctttttcctaaaagaaaaaacgcacctacgattgcagatgcgtttggtaagtggctcgggacggaatcgaaccgccgacacacggattttcagtccgttgctctaccaactgagctaccgagccaaatgttttatttttctctactaagtaaagtaaaatggcggtccggacgggactcgaacccgcgacctcctgcgtgacaggcaggcattctaaccaactgaactaccggaccttacagtaattgcccggagagctgtcgtgtcagctctcacagacaaataaggaatttagcaataacgctaaagtaaatcaatgacccgtacgggattcgaacccgtgttaccgccgtgaaagggcggtgtcttaaccgcttgaccaacgggccttcacgaaatggtgagccatgaaggactcgaaccttcgaccctctgattaaaagtcagatgctctaccaactgagctaatggctcttaaagatgtcggaatttctatagagcaaacgacttagatctagttctcatcttgtactctattgaagcagtttccgtaacaacgagatttataatatcacgaacaaatagaagtggcaataacttttttggttttttttcatatttttttctcagaccaacttatatgcagctttcaaacaaaaaacaagccccttatataggggcttgcagacatattctatttagttcgcacggtacacactgcgaaggacatttgtttgtgagcggtctggaccgacagagaaaatagaaagcggaatgcctgtcagctgagacacacgctcaagataatggcgcgcattctccggaagctcgctcaagctcttcgcacctgtaatatcctcagtccagcccggcatttcttcatataccggctcacattcagcaagtgccttaagacttgctgggaattcttcaatgatttcgcctttatagcggtacgccacacagattttcaacgtttcaattcctgttaggacgtcaattgagttcagagaaagatctgtaattccactcacacggcgggcgtggcggacaacaacgctgtcaaaccagccgacacggcgcgggcggcctgttgttgttccatattcgcgtccgacttcacggatttgatcgccgatttcatctttcagctcagtcgggaaaggaccgtcgccgacacgagtcgtatatgcttttgatacaccgacaacgtgcttgattttggtcgggccgacaccagaaccgatcgtgacaccgccggcaaccgggttagatgacgtaacaaacgggtatgttccttggtcgatatcgagcataaccccttgtgcgccttcaaataatacacggcgcccttcatcaagagcatcgtttaagacaacagatgtatcgcaaacatactttttaatctgctgtccgtactcataatattcgtctaagatatcctcaagtttaaacccttctgtctcgtacattttctcgagaagacggtttttttcttcaagattgcgctcaagcttttccgcaaacgcgtcacggtctaacagatccgcgatgcgaattccgatgcgggctgctttatccatgtaagcagggccgattccttttttcgttgtgccgatcttgttagcccctttacgctcttcttccacttcatccaatttcaaatgatacggcaaaatgacgtgagctctgttgctgattctcaggttatctgtactcacgttgcgctcatgaagatacgcaagctctgtgactaatgctttcggatctacaaccattccgtttccgattacacacgttttatccttatagaaaattccagacgggattaagtgaagcttatatgtgattccgtcaaacttgattgtatgccctgcgttatttccgccttgataacgggcgatcacttctgcattttctgataggaaatctgtaattttaccttttccttcatcgccccattgcgtacctactacaactactgaagacatgtccgtgcacctccgttaacctttcaaaacgattctattcaaacaaatcaagtttatcagtgaagaaacagaaagtcaattgtaaatccgaacattaaattattgtaaatctatattcgttcgctttcattcgttttataagcgttttctcacggttttgtcataaaaagcttgcgaaactttcatcctttagcataagaaagaatcacttgcctgatatcccttttgaattcataaaaacgacccgccagccgtccgggtcctctatcgtcactcccccattgctccagtacgggttctctgattcgacctcttgatagcccatgtgctttagctttgaagtgatcgctgccagttcatctgcattcggcacataaaaaacaagaaggctgtcgggatggggaacgggggcagtgcttccaccttcatactgggtgaattccaaatgataatcggcatgaggaaggccgaacatgacaccgtcatacccgttatgctgtgaaaattctcctattcgtttcaaacacagtccctcttcgtaaaaacgaataatctcatcaagctggcccgtaggacgcgcaattcggatttgtgctgcgtgaaaagacgaaaaacgtttttccatattgttaccatctcctttttgcaccattttattaaaacgctttcagattttcatccgctgagcgaacggtatttcttccatctttcgaatgaaaaaaaccccaagagcagctcttggggcttatgcgccgggcggaactcctgcgtcatcaaaacgccgttccaggttgacgaatttgttgtattcttttacgaacgcaagagacacggttcctaccgggccgttacgctgtttggcgataataatttcgataatatttttattctcggtttctttgtcatagtagtcatcacgataaaggaacgcgacaatatccgcgtcctgctcgatacttcctgattcccggatatcagacatcatcggacgtttatcctgacgctgctcaacacccctggaaagctgagaaagcgcgataacagggacttgcagctccctggcaatcgacttcagttcacgggaaatttcagatacttcctgctgacggttgtcctttgaacgaccgcttccctgaatcaattgcaggtaatcgatcaaaatcatgcccagcccgctttcctgcttcaagcggcggcacttggcacggatttcactcactcgaatacccggtgtatcgtcgatgtaaatcccgctgttcgacaggcttcccattgccatcgtcagcttgccccaatcctcttcggtcaggttacctgtacggagattctgggcattgatatttccctcggcacagagcatacgcataacgagctgctctgcacccatctcaagactgaaaattgctacgctctcatcggtctttgtcgccacgttttgtgcgatgttcagggcaaaggctgttttccctactgacggacgggcagccacaatgatcaagtcgttgcgctggaaacccgcagtcatccggtcaagctccgtaaaccctgttggaattcccgtgatatcaccttttcgattgtgaagctgttcgatattatcataggtctggacaaggacgtccttaatattttggaaggcactcgtgtttttgcgctgtgccacttccataatcgttttttccgcttcactgagtaaatcctcgacctcatcctcacgggtatacccgtcttgagcaatcgttgtcgcagttctgattaatcggcgaagaatcgatttttcctcaacgattttcgcgtaatattctatgttagccgctgtcggcaccgagtttgcgatatctgtcaaatatgaaatgccgcctacttcttccagcaggtctgtgttcgcaagctctgatgttactgtcaccagatcaaccggttcacctcggtcaccgagcaccagcatcgcattatagattttttggtgggacattctatagaaatcatctggaatcaatacttctgaagccagtgttaaagcagacggctgtaaaaaaatagcgcctaacacggcttgttcggcttctatattttgcggaggaagccggtcattcagaaggtctgtcatgctaagcaccgtcctctcattaaaaaatctccaacctccattctaccatttctacagaaaaaaaatagaaaaattgtctgtttcctgtttttttcagttagcagattggatcgtttcggacagtaacaaggcgggaaaaatgcaataaaacatgagggaggaatgaaagatgataaagaaatatgcgattacgcctaatgttgatgcggacggctggtttattgaggtggagaatgtagcgccgacagctttgtatacgtctaaagacgccgctattgaaaaggccaaacaggtggctaaggaaaacagtccgtctaagcttgtaatttatgaccagtttaaaaatgtggaagaagaacactcattttaatgaatgaaagccttcgctgcagcgagggttttttagcggttatcggtttatttcatccattggatgcctatgtgcatcatcaaatctgccgctttttgatacagatcccactccccgatcgaagcaaatttccccatcagctcccgaagctttagcctcactgctatatattcttcgaaagtgacagctttttcagtgtctatttggtgttccttcagcatttgttttaataaagacaacggtgcgtgcataagaaccctccttacctcttttataacggtcattttccgattgctctattcctttgtgacatcttcttacatttcacatctgattcttgtacaatggacagaagagaggagggatcttttgtgagacctttgcaaatttctgctgaaactgcacaaaagcttgcagagtccttgaatctgccgcttgaacagatcatgcatatgcctcagcatattctgcttgccaaaatggctgaactgcaaaaagaggacaaatcatagccttcattcacatacttgcttacctgtttcgggataatatcatgtatatgttagaaaagaggagtaactgctttgccacatccacataataaaaaaatccaatcattttggctgatcaccggcattatctttatcgcctttaacttacggcctgcgatcacttcagtcggtccggtcatcagctctatccgggcagagctgcacatgtccaatggggcagccggttttttgaccgcactgccgctgctttcgtttgcagttctttctccgcttgcacctaagcttggacaacgcctcggaaatgagcgaactttatggctaggtctcgtgatactgcttatcggtgttttgactcgttctaccggctatactgccgctttgtttttcggaacggcacttatcggcgtcgggattgcgattggtaacgtacttttgccaagcttaatcaaacataaataccctgaaaagccagggatcatgatcagcctgtatacgacatcaatgaatatattcgcagctttagcatcgggtgtcagcgttcctttagcgacccagatgaatcgcggatggaaacaagcctttctcttatggggcgggctggctttgcttgcattgctgatctggatacctcagctgcgccatcgagatacggcaaaccagacaatgaagctgcaatccagttccatttgggcttccaaaatggcatggtatgtcaccatctttatgggcctgcaatcgtttttattttacagcagcatcgcttggtttcctgaaattctccgttcacacgggattgatacggcaacagccggatggatggtatcactcatgcaatttgcgagtctgccttccacttttctgacgccagttttagctgaccgtgtgaaacagcagcgcggtatcgttgcggcgctggcctcagtttatctgatcggcctctgcggattattagcgggcggaagccatacattgcttgccatctggatgatcattatcggtatcgggcaaggctccagcattagtctggcgctcactttgattggtctccgcagtgaaaatgcccaacaggccgctgcgctgtcaggcatgtctcagtcattcggctacctgctggcagcagtcgggccaatctttgtcggctatctctttgaccagacgcattcttggacgatgccgattgtgcttctcattgctgccctgatcgtaatgggagcagccggacagggagccggacgagatcgatacatttttcagtctgaaaaaaaaagaaattcagcataaaagcggggaaaatatctccgcttttttctttgaatatttatggtttattcataagtttttcatatttgttttttacaattagacaccataaagaggtgaaaaacgatgaaaaccaaacgattcgacgcagcccttatttttattttgctgggagcagcttttttgaatacgtatcacatttggcaggatgatgcagcgaaccagtactatttggcggctgtaaaaagcatgacgcaaagcttccataatttcttttatgcgtcatttgacccttctggatttgtgacagtagataagcctcctgtcgtgttatggattcaaacgattttcgcactgattttcggtgttcacacgtggagtgtcatcattccccaggctcttgccggagttggatctgtcttccttctctacagaatgattaagccgacttttggagttggagcggcccgcattgccgcacttgtcatggcactgacccctatcgcagtagctgtcagccggacaaacaatattgatagcatgctcgtttttaccatattgctcggttcagcttgcctgtttcgggcagtaaaacaaggcaagctggtttggctgctgatggcatttgccctgattgggctcgcctttaatatgaagatgatgcaagcgtttatggtattgcctgcatttgtgttattctacctggttgcatctcgggtttctctgaagaaaaaaatcgggcccctgcttctgtctcttgtccttctgacaggcctttcactctcatgggcgattgcagtggattcagcctcttcctcaagccggccttatgtaggaagcagccagaccaactcagtgctagaactggcctttggctacaacggcacagagcgtctgcttgggcaaactacgggcctagcaaagggtgatatgaatgctgctggcggagggaacatgcagaatcaagacaacatgcaagcgccaaatggcaacggttcatctttttctcagaacggaaatcaatcattcggaaaccattcacaggcgcctcagccgcctaacggacaaaccggcgctctcaatggaggcggaggcacacctcccacaggtggcaacgggcctggaaatggagggcctggcggcggaaaaagtatgaatatgttcggcaccggtgatcctggcccgcttcgtcttttccaatcagcactttccggccaaatcagctggatgcttccattctcattgatcggattactgggcgcaatcgtcagctggtaccgtgatcgccgcggacatgctgctaaaatgaaagaaacgctattctgggcggcttggcttgttcccgtggctggtttcttcagcatcgcaggattcttccaccagtattatttgattatgctggcaccgccgattgccgccctttctggtatcggatggtatacgatgcaccgcttatacaaaaataataaagactggtccagctatcttctgccggcagccgtcttgatcacagccgtgtttcagatgtatattctgagcgcttatacaagccaaatcggcagtgtatggatgtatgtcctggggctcttaggactgggcatcacccttgcacttctgatgcttaaacgcagccatccgttcagtaagctgctgaccatcatcagcttgtgcgttctgcttctcacaccagtttactggtcagcaacgccgcttctatacggtggtaacagcgtccttcctgaatctggcccgcagctcaaaggctcagcaaacggcgggaacatgttctcttcagaggtcgacagcgggctcctgtcctatctgagaaaacacaataccggcgaagaatacttatttgctactttgacaaccgtaacagctgcgccatacatcatttacgaaaatgaatctgttatggcaatgggcggatttaacggcacggatcccattctgactgtgtcggaactgaaaaaactgatcaaagaaggcaaagtgaaatacttccttctgtcagaaaacaactcaggcaacagcgaacttgtttcctggattaagaaaaacggaaaagaaataacatctgacgagtacagcggttcctccagcagcacgaacagcgtgcagggaatgcgaggaggacctggcggagaaagccagcaaactctttatctcgtggaataaaaaaaagaggcttggatgaatccaagcctcttttctattaagcttcttcttttacatgtacctttaacacagcctgcacttcaggatgcagcttcacaggcacgttcgtatatcctaatgcacgaatcccgtccggcagttcaagcttccgcttatctactttaatgttatggtctttttggagctgttcagtaatttgcttgcttgtcactgaaccaaataaacggccgccctcacctgattttgcgctaagctcaacagtcagtttttctaatgtctctttcaagctcttagcctgctcaagctcggcaatggcttcttttttctctttctgctgttgtccgtttagcgcgctgatgtttgaagcgttcgcttcaaccgcgaggccttttttaattagaaagttatgcgcataaccgtctgctacgtttttgacttcgcctttttttccttttccttttacatcttgtaagaaaataaccttcatctctgtacgcctccctcaaaatactcatctatggcgtgcttcagccgttccagcgcttcagaaactgaaatgccggacaactgagtcgccgcatttgttaaatgccctccgccttccagggcctccatgatgatctgaacatttacctcgccaagcgaccgcgcactgatacaaaccgtttgttcatcccgtctcgccaccgcaaatgaagcctcaacctcactcatcgacagcagtgaatcagcagcctgcgcaatcagcacttgatcgaagtattcctcttcattttcaggaagagaagcaatcgcaatgttatctttatagaggaccgtatgctggatcagcttcgcccgtttaatataggaatcaacggtttctttcaggaacttctgcaccagcaccgtgtcggcgccttttgcccttaaataagaagccgcatcaaaagtccgcgagcccgtgcggagagaaaagctctttgtatccactattataccagctaatagggctgttgcttcaatcatattgatttttaagcgcttcggctgatattcaagcagctctgtcaccaattccgctgtggaagaagcgtatggttccatataaacgagcagcggatctctgataaactcctcacctctgcggtgatggtcgatgaccacgatatgttcaattttattgaccagccgttcctccataacgagtgacggcttatgtgtatcaacgatcacaagcagtgtgtcatcattggaaatttccattgcttcttcaggcgtaataaatcttgaccacagttcttcatattttttgatttccccaatcaaacgctgcacacttgatccgatttgatttgggtcaatcacgataaaaccatctttgttatttgcctgagccacctttaaaatcccgatcgctgcgccgatagaatccatgtcggggaatttatgccccatgataatcacattgctgctttcggtgacgatttcctttaaggcgtgagaaatcacgcgggcccgcacccttgttcgtttctccattgggtttgttttaccgccgtaaaacttcaccttgccgtttggcagcttaatggctacctggtctccgccgcgtcccagtgctaagtccaagctggattgcgccaaatcgccaagttctttcagggaagagactgaagccccgacaccgacgcttaacgtcagcgctacaccgtcaaacgaggttttttcccgcacttcatcaagaatcgaaaacttcgaattttcgagttcagttaagatgtgttcattaagtacagcgataaagcgttctgaagacgtccttttcaagaagatcccgtactcctgcgcccaagcgttcagcaaagatgtcacctggctgttcatcgtgcttctcgtctggtcatccaatccttgtgtcacatcatcatagttatcaaggaaaatatatgccaggacggttctttcgttttcatatagcttttcaatctgaatttgttctgttacatcaaagaaatataacagacgctcatcccgtttgatgacaaccctaaacttgcggtcattcaatgtaaccgtttccgattccacctcttgtttgataagcggcactaccgattcacaagtatcgtaaagtgatctccccactaaagtgctttcattaaagcaagaggaaagaaacggatttgcccattctatataatattggtcattaaaaagcatgattccaatcggcatttccatcaatgcctcttcaccgacttttttcaacctgtaggacaacgtagaaatataagcatcaatctcttgtcgaataagagaatcagcacgcttaataaaaaacaaaataactgccagcagcagcacttcgacggttcctaatatccagttaaaataaaagctgatgaggattgtaataattgacagagcaatcaatgcatagatgggataccgaaacagcggtttttcataaaagcttggcatttctatcactccccaccatgtgagtaaaactcatgttcacttcaccttattccttatatgaaagcccatatctaaaacgcctaaaatgcgaatggctgccatgaagaccggatgcacaaacccaagtatgacagcaatcacagccgcagcctttggatattgtttcttatggcaatagaaaaagataaatgataaaccttggatgaaaatcagaaacccgagtataaactccccatttaaagcgatagagtacagcatttggcctttttctaaaggcaaaaatgaaagcatgacaataatcaaatacagtactacaacactttgcggaaacttcaactctctaaaaggctttagattaggaatatcgggggagaatcgccttaagagcggcttagcgataaggtaactgaggaaagaaaaaataactcctaccatcacaatagctgttggaaaaagatattgaacgatacccaattgttcttccatcagttttaattgcttctcaaactgtccagcattgcccgactgcttcgctacagtttctaccatatcaagagattgccggtattgtgtcatcgcctcatcaatgatattgatacccaaaaactgaatgcttatcacaaaatagaagacaatactaagcatataaataagagcgcccgaaataatggcgtgcccgggctctttccttttgaaaaaatgtcccatggcaatgccggcgcaagctgacataaaagctacaataagcccgttaaaggacccgacaataaaaacaaccggaagactgacagcgcccatccatatccctagcttcaatccatgtctgatcgtatacaagatcattggcagcggcagtgcaaataacagaattgttccaatcacaggaacataaacgaccagaagcgtgatgatcgcaaacagactgattaaaatagcaccttccattaaagctctcgtttgtttcacttagtcacctcgtatcatcctgaacatacgaatagaaaagagcagcataaacgactgctctttttcatcgctgcaacatacgttgcaccgaatgtttttatatcatctctaaattttacttttatattttaacataagtccaaatcgcaagtaaaatgacgctaatgtttcatgtgaaacataaaaaatgaaaagacattctttgaaaagaatgcccatcacaattaatgtttatcatccataaagccagaagattccttgtttttctttttcgtttttctgacatacataaaaattaagatcaccagtaaaagggttgttgcttgcagaacgccgctgctaaacaagaaaaagttctttatcatgtcccacattgtgtttcacctctttgtgcatgttctcaacccgtatcctatataaggtgaatttccctttttataaacttcaaaacatcatgaacaacattgagcgttgggcatatgctgatatggaatctgatcgataaaggagaattttcacatggatgaacgcagaacattggcttggcatgaaacattagaaatgcacgagctggttgcttttcaatcaaacggactcattaaactgaagaaaatgataagagaagtaaaagaccctcagctcagacagctttataacgtgtctattcagagcgttgagcaaaatttgagagagcttcttccgttctttccacaggctccgcacagagaagatgaggaagaagaacgcgcagataacccattttacagcggtgacctgctcggttttgccaaaacatctgtccgcagctatgccatcgcaattacagaaacagcaacacctcaattaagaaacgtactggtcaaacagctgaatgctgccatccagctgcacgcccaagtttatcgatacatgtatcagcatggatattatccgtcttacaacctttctgaactgttgaaaaacgatgtcagaaacgccaacagagccatttcaatgaaataaaacaagcagcaaaggagttccctttgctgctatttctgctgatccttcactaagccgttcgaacgataagattccagcacgtctctgttggattctccccattctttcatttgcaaaacaatcggttcaagcgttcgcccgaattctgtcagagagtactcaaccttgggcggcacctgttgataaacctcacgatgcacgatgccgtccgcttccagctccctcagctgaagagtaagcattctttgagtaatactcgggcagattcgccgaaactcattaaatcgtttcttgccatctatcatgtgataaaaaagaattcctttccactttccgccaatgacatctagagtaaattcaactggacagccttctttgttcgggtatatattcttttttccactcattcttgaccctccaatagtaccttttttgatactacattacattttgcaactaagctacccagtattttacacaccttttctccttagctcaaagaaaatgcttcttattcacatcaatttttaagggtttgcatgattacacctgcagcaagacgtgttaaactatataaagattacactacttaaaaaaaggataggagctatcatggaaaagatacttattttcggacaccaaaacccagacacagatacgatttgttctgcgattgcttatgctgatttgaaaaacaaactcggcttcaatgctgagcctgtccgtctcggacaagtcaacggcgaaacacaatacgcgcttgactatttcaaacaagaaagcccgcgtcttgttgaaacagctgcaaacgaagtaaacggcgttatcctggttgaccataacgaacgccagcaaagcatcaaagacattgaagaggttcaggttttagaggttatcgaccatcaccgcatcgctaactttgaaacagctgagccgctttactatcgtgctgagcctgtaggctgtacggctaccatcttaaacaaaatgtacaaagagaataacgtgaaaatcgagaaagaaattgccggccttatgctgtctgcgatcatttctgattccctgttatttaaatctccaacttgcacagaccaagacgtagcggcagcaaaagagcttgcggagatcgctggcgtagatgctgaagaatacggcttgaacatgctgaaagcaggcgctgatctaagcaaaaaaacagtggaagagctcatttctcttgatgcgaaagaatttacactcggcagcaagaaagtcgaaatcgcacaagtaaacacagtggacattgaagatgtgaaaaaacgccaagctgaattagaagctgtgatctcaaaagttgtggctgagaagaatcttgatctgttccttctcgttatcacagatatcttagaaaatgattcacttgctcttgcaatcggtaacgaagcagcgaaagtggaaaaagcgttcaacgttactttagaaaacaacacagccctcttaaaaggtgttgtttcccgtaaaaaacaagtcgttcctgtcttaacagacgcaatggctgaataagcaaaaagcatcccgcatcgggatgctttttcttattcacccagcttctcaatttgtcccatcacatcagtaatttgctttgcgttttggaccaggtctgactgctccaattctttaagcgataccttgccttcctcggcttgtttcaacacctcttcagcgcttttctgcaaggtttcgttatgctcctgaatggttcgatgaatctccgctgcggcatcaggcggcgttaattcattaaaatcagcggcatccttctgaatcgattcaagctgcgcttcaagtttttctttcgcctcggtgtcatttacagctttctcagccaattcaggcgcttcctctgcaaatgtcttcaccttctccacataccccgctgcttcactcgtatagttcaatccgtcgttcacctgatcaagcatgccgcatccgcctgcactcaaaagtcccactccggcaagtactgtcaaaatgatcttcatcttcagccccctcatcgtttctttttcattttttcttttaagatcggaatcaatttctctttcgctaacggcagccctttcctcaccaattcacgcttcagccactttttcagcttagacattctgatgctcctctccctttttgataaaaatgaaaaaactccaccaatttggtgaagttcctgaaacaaaaagaccttcaccaaatcagatttggcaaaggtctcgctaacaaatgagattgccagcaaagccgaggacaacttgtcccgtaatgacgactttactgtgaaagctactcccctttggagtgttcatttttattactttcattctaaagcaccgatctgttccagtcaaattcctgccgtttatataaaagcgcgctgtggtatttaaaatttgaatggtttttccatcaggagatcatgctatgacagaggaggttttcatcatgagtcaagagcgcgtgaaacggcctgggcataccagatggtacatatcttcgttacttagcggcattattattcttaattattttgaccgagtggccatctcggtagcggcccctgcgatacaagattcgtttcaccttactgcaactgaactcggcatcgtgttttccatttacacctattcctatacactgatgcagctgcctgtcggaagtttgctggaccgttttggggtcgcatgggtcacgagggttggaatgacaatatggagctttttaacgatccttcttgcttttttgcaaggaaaattgctgttgtatctgttccggtttctcattgggctgacgagcgcctctgcgttccctgctgcctctaaagcaaccgctctctggtttcctccaagtgagcggggattggcaaactcactgttcgattcggccgccaagttttcaaatgtaatcggcgcgccattggtcgcctttcttgtcacaacatttgactggcgtgtcgcttttttgacgattggatgcatcaatgtgctgtttacgatctttttctggcagtattatgaacagcctgaacggcacaaacgtatttctaaaagtgaactaaactatattcaaaaacacaatgccattacaacagagcaaatcccttacaaaacgggcccgcttttaaaaaagcttttcaccaatcggaaagtatggggcttaatgatcggatttacagggtacgggtatacattcaacctgctgctcacctggcttccgactttctttaaacatacatacggtatggatctcatgtcgtccggtttatttacggcagtgccgtggctgatctcaaccatttccggaattgccgtcggcggctggctcgtcgattattttattaagaaaggctatcctaacaccaaggtgtaccgaaccgtaatcatagtcggaatgagctttggctttttctttttaggctccattctgacgaacaatattaccgtagccattatttgcatttccatcggactcgccggaatttcagcaaccgctccggtcggctggtccatctccgcagaactcgcgccgatcggttccgtatccatgctgagctccatggtgaatctcgcaaacaacctgttcggaggcattattgctgcgtcactgacagggtatttgtttgatgtgacaggctcctttacactcagctttctggtagctggttttgtgctgttgctgggattggttttttatgtgtttgtattaggggatgtaaaacgaattaaactggaatgaagagtgcttgctgaaaagcactcttttctttgaatccgccaggtgttattttctttctcccaacattcactaggctgtcttcggacgaaaacaccaccattttatccttgactccaaccaaaggtaaggcctcatagtgaaagaagaaaggaggagtcagatggtgaaattaacagtaaaagaactatccaatattgcgaatgtcacaatcaaaacgctttatcattaccacaaaatcggcttgctagccccaaaggaaataagcgaagccggatatcggtactatggtgctgaagaactaaaaagactgcaggaaatccttttttacaaagaattagatattcctttgtcagaaatcaaaacattactaaaagaggatgctgaaagaacaagtacattagaaaaacaaaaaaagctgtttgaaaagaaaattgaaaagtatcagcgtctcattcaaacagtcaacacatctttagaatacacgagaaaaggcgaaaacatggatcataaggtaatgtttaaaggatttgaaagcgctgaagaatggaaacaatctttagcagaacaaaatgggtatttaaaagagcgttacgattttgaattggatacacatacaatcaatgtcgatgaaatgaacaaaatggcaatagaggctaaacattttcttgataggatggctgattttttaagaaacggtgtaacgtatcatgacccttccgtgcaagagcatgtcatgaatcatcttaagttcctaaatcagaacgggcatccgacaagtaaagaagattacgtaaaacaaacacgtttttttatgcaagatgatttccatagaggaatgttagaagagcagcaaaccggtttatcttattatttggttgtcgttgcagaacacctgtagtgttttgtcaccctttatagggtgacagccatcaggattacgagacagcaccgccaacaatcgaaacattctgccggtcaacggcaaaacgccgtccgttccattttaatacggtttgaacatatcccaatgagtcggcgttataccttcccgctatccgctggtacgccaataattcgtatacgccgtctctgtcaaaatcaaccggatacaaacccgataaaggattcacccatccttctatcggcatttttaacacaccttggctgttataaatctcattcaaatattccctgcctttgtaagtaaggtcgaggatatacgtttcgttttgctgatgactgatgacgctcgctttatattgattttgatacctcacactgtactttaattcatcattcaatacatctgaattgaaaattcgccggaactgcctgtttagataggcaaacacgtatgcataaatagcaccgccgcttccccctgtatctattaccaccgccacatcctcaatcttgtcgcctgtcatatcccccagaaaaagtgacggattgtatcccatattgttttgaagctgaatctgctgctcctgatgggttctgccatcacagatcaccaatgtgatatttctccataacaggctgccgggcatttgatttccagttagaaagacctcatcaataacgccgtctcccgttacatcgccgcgagtagatgcaatgattgcacgtgaggagacaggctgccgaaatacgtatggatgttgaacaagtcctctgctttcataaaaccaataaggagccattctgatgtcatacacattcaattgtgtcaccttccctaatcagctgaatgaatcattatatgcaggaatggcacatcaaagacatatcttacacaccaattaaatccgtaccataagagttatcgattacacaaagccactcgccttgcgcattcttcttaaatacataggtcgcccttctttccatcgcatactcggagtcctttttatccgaatcaagcagtgtctgagaaaggacgagtaccgtgtcacctgcttctaacaggatcatttccccttgtttcgggacaatatgatgattgaaatagttcacaatcgtaataaacgcttttttgatttcttctttgcctcgcgcgatcatgcccggcttcacgactaaaacggcatcttccgaataataattcatcagtgtatcaaaatcttcattttggattgccaaatcacacgcagagatgatgtctttcaattgctgttccaaatgaattcccccaatcatcatgattggatatattatacatcgctagaccactgaaaccttgaaaacaaaatgaaaagtatccttttttcctatataatcaaatagatatatttaacaaagtacccaagtgaaggggtgaacattattgtctgcggaagtaacgttacatgacaatatacattatgatttaagtgcggattgccagcactgttttggcctgtgctgtgtcgccttgccttatgcgaagtcggcagattttgcttttgataaagacgggggcacgccttgccgcaacttacaatcaaactatcaatgttctatacataaagatctcagagaaaaaggatttcgaggctgctctgcatatgaatgctttggcgccggccaaaaagtatcccaaatcacttatgagggaaaggattggcgaaacagccccgaaacggccaaccagatgtttgacgtttttcctatcatgcagcagctgcacgaaatgctctggtatttacatgaagctctttctatagatatagccaagccgattcatcctgaactgagaaccagtttcgaaaaaatagaaaggctcaccaggctcagcaaagaacgcttgctgacactgcaggtggacgagcatcgagctgaggtcaatgaatggctgttaaaaacgagtgaactggtgcgtgcccaagcccgccatccaaaactcccgaaaaaggtcagccggggaagtgtcctgatcggcgcgaaactgaaagggcttgatctgcgaggagcaaatctaagaggggcgctgctcatagccgccgatctgagatttgccgatttgagaatgacagactttatcggtgcagatatgagagacgctgatctcagcggcgccgacctgaccgggagcatctttctgacacaggcacaggtgaacgccgccaacggcgattcgaaaacaaagctgccgctgtctgtacgaacccctgcccattggaaataaaaaaggacccgctaacggtccttttttactgatcaattcaatcctttttcgttccttttatccggcattttcacacttcttgccaagtatcccgacagccataacgcaaccagcagcatgaaggtgatcataccgacgacgcccagccagtgaaaagcagaccagaatagccctccgactgttccgcaaacacttgaaccggcgtaataaaagaacaaatacagcgatgaagcctgtgctttgttatgaagggctctcctgcccacccaactgctggcaactgaatgtccgccgaaaaaaccgaatgtaaagagggcaatccccagaattttcactgccagcatactgtttatcgtgaataaagcacctgcaatgacgatgaaaatattcatcaccagtatttttggatagccatatcgatcaaccattcttccaatgaaagacgagctgaaaatgcctacaatcatcacaataaatatccagctggcaaatgctttattaagcgaatacggcgggcccaacagcacatacacaatgtaattaaacaaggcaacattgcttccgagcagcaaaaaaccaatgagaaacaaactgaatagttttcggtccttcaagtggccaatcagagacattcccaatttcccgagcttcaattttcttggcgtaaaatgcctggatggcggcaaatttataaaaaatataacactagcaatcaaactaatgacaccaattgatcccatcgccatatgccaattcaagtactcgctcaggagcccggaaacgatccttccgaaaacggcgccgattgcatttccgctgatatacagccccatcgccgacccaagacttccgggttcaatttcttccccgagataagccatcgcaatcgacggaaggcctgcgagcgcaacgccttgaatggttctcaatacgagcagcgtatgaaagtttggactaaaggccgatgccagacagagaaccgatgcggccagcatggaaatacccataatcggcttgcgcccccacacctcggataatgaaccaaagacaagcatgctcacagctaacagcattgtggtaacagataaagaaagactcgccgcagtaggcgttacatgaaattcccgcgtgaattcctccatgagcggctgtacgcaatatagaatcgcaaatgtattgaaacccgcagcgaagaaagcaaacgtaatttttcgaaaaaccggtgtgcctttttgaatgtatgtcatcgggactttatcggtccctcatcatgttgtggagcactgccattcataaacaaccatcctttatttcttccgaattcaaacatcctcgagtctgtttatattactatcttagcaccgttgatatatgttgtataatgcatataaaatatcattttcatgcttatatgtaataaaggagggatgataattggaatgggaacaacttgaatattttcaaacactggcccggatgcagcacgtcacgaaagccgcaaaaagcctctccatcacacagcctgcgctttcacgctctatcgccaggctggaaaatcatttgggcgtcccgctatttgacaggcaaggacgatccatcagcttaaatcaatacggacacatttttttgcggcgggttcaggcgatgatgaaggagtacaccgaaggaaaagaagaaatccaagccttattaaagccagaccaaggcgtagtctctctcggttttttacatacattaggcaccacgctcgtgcccgatctcatcggctcctttcagcaggaataccccaacattgccttccagctgaagcaaaaccactcttattggctgcttgaacgattaaaatccggagatctggacctctgtctcctcgcttcgattaagcctgaaaatccgatccaatggatcaagctgtggagtgaagaactctttgtatttgtgccaaatgatcatccattagccagtcgcgaaagcattaccctgaatgagattgccggggagcgttttattttattgaaaaagggctatgcgcttcggatgacggtcgatgagctgtttgagaaggccgatatacagccgaacattatgtttgaaggagaagaagcagctactgccgcaggttttgtggcagccggactgggcatatctattctcccagacctgaaaggcttagaccaaagcaaaatcaccaaaatccgcgtcagctggccggaatgtcagcgtgtcataggaattgcctggataaaaggcaggtttttatcaccggttgctgagacctttaaacaatatgtgatcagccatttttctgagtagggaggattcaaacatgaatgtcaaaaaaatcacgtcagaacaggatttacatacagcgtttgaaatcagaaaggcagtatttgtagaggaacaaggctgtcccatttcggatgaattcgatgagttcgatacactccacggtgactgccagcacatcctagcttatcatcagaatgtacctgttggcactgcacgtgtccgtatcgttggccacgcggggaaactggaacgaatctgcattctgaagtcttaccgcaaattcggtttgggaaaagtgatcgtcgatgcattagaacgtattgtgaaagaacaaggcatttctgccttcaaactgcacggccagacacaggcggcaggcttttatgaaaagctcggctatcagactgcatcagaagaatttatgctggacggcattccgcatgtactgatgacaaaacaagacgattctgctttatagattgttcacaaatttgtcacttatgagcatgaacagttcattggtatactaatcaccgattatggagagaaggaatgattgtatgccagcaaataaaaaagagggtcttatatttggcgtgatgatgtgttttggaatggtctgcgtcatgtcgatttacaatgccatcatcaacggagccattcaggatttttcactggtgaccgtttttgaaatggccatcggttttatggtcgccctcctgttcgatttactgttagtgggccccctcgccaagaagattgcattccgcatgccgttcgacaagactaaaaaaatttatgtcatccttgccatgtcaacttgtatggtgattggcatggtactttgtatgtctgtgttcggtttagtgacagcggttctggcaaatgggctgaacggggacagcctcttcagtgcttaccttatgatggtgttgaaaaatttcatcctggcctatccattgcaattactgattatgggcccattagtcagagggattttcatgaaatttgtaaaaccaaagctcaaaactgcaatttaaatagaaaaggagtgagcctgacactcactccttttgctcatgaatcgaatgtaaaacaagctccgcaaaagcctctgcggcaggcagctgccattttttctttttgagtaaatcggatcaaggactgcaccatgctgaagaactttcagcttatgtttttcacttccattaatccctataccttaccaaatagtttttatacaattcttcgttataaagaatttcttcgccatgtgaagagcaaatgagcgttggtttgatttgatctatgattgagccgctatcgatgttctcatttatatcaacactgaatcttcttataggtgggtgtaaatcctccttacttgtgataaaaaggtcgcccgttaatagcgtacgatcgattttatgatcatacacgacatgccccggcgaatggccaggtgttaaatagtatttcagaggcaggtgagcaagcgtttgctccgtcagcggctggacaatatgggctacccctgtgttctccacttcatttttgttcggatatggctcttccccattgatgtattttagttctttctggtgcgcaaaaatcggaatatcaaatctcactaaccattttgatgcacctccgatatgatcactgtggccatgggtaagcaaaatggcttttggattgccgatcgctaacgctgccctaatttgagcatcagcaaaacgttctattcccgtatcaacaatatatacatcatcaccatctttgataaaccaggtatgaaccggaatccgaagaggcacatcaagctcaaattcacattgatagacatgctctgataattgtctcaagttcacgcaaaccactccctttggagatttttgatagtttaaaagaaaaatagaagtgaacggactattttcaaggcagattatcttgaaaatggtcccacactccagcggaccggtattcttgaggaggagacgccgattttcgccagcatcagctcgacttgttaacattgtccattaataatccctcttgttccccttcttcacatactcccaatcacgttctatattcttcctcactctatgaaggagtgcagaaatggtttccttttcctctgaagtaaaaccggacaaggccacttccgtggaatgttctccttctcttcttaacaatggatatacctttttccctttctcagtcgggaacagtttttttatttttttattttgctcatctggcagtttttgaataaatccctgcatttccagcttcttaatggcccgcgcggccgttgtccggtccacctttatcatttccgccaatttttcttgaataattcctggattctcgtatatacgtacgagatagaggtactgccctcttgttaagtccaaatctttaaattcgatgttgcttatggaatccaacgctcttgctatcatgccgatctcacgcaaaatatcattcattcctaaaacccctcacgtatttttgttgcaattacaacaaaaatgttttaaccttactattataagaccacatgcgtgctgtacagtccagactaatatcagaaaaggattgattcataatgaatataaaaagaataacaactgaagctgatttacatgaagctttgaatattagaaagacggttttcattgaggagcaacatgtatcggaatccgaagagttcgatgaatttgatacgctccaggaacaatgccagcatgtcttggtatatcatgagaatcagcctgtcggcacgggccgtgtgcgcatcgttgaccatacagcaaagctggaaagaatctgcatcctaaaaccttaccgtaagtatggattgggaaaagtcatcgtaagcgggttagaagaaatcataaaagaaaaaggactgactgcatgtaagctgcatggtcaaacacaagcagcaggcttttatcaaaaactgggctaccagatttcttcacaggaatttatggaagacggcatccctcacgtcctgatgacaaaagacatatcgcggatttaacatgaaatatattttttacggattaggaatacttatattaagtttgggcatttccttaaccatacaatcaggactgggcacatcacccttcgatgcccttttggtgggtctgtcaaaagaaatcggtcttaccgtaggaagctgggaggtccttatttctgtgatcctcttaatctgcaacgctatattaacgagaaaaaaacctattttgctgggcttgattacagcattcattactggaataggcattgacctatggttgtttgttgtaaaaaacaccctctatctaaacgcgttgttaagcaaactgatttgtttcggaattggtttggtgctcatcggtcttggaacagccatctatcttcagacgaaattcgcatcaacgcccatcgatcatttaacacttattatccgagatctctccaaaagaacaatcttgttttcaagaacattggtatacgctcttttcttagtattagccatcatctttaaaggccctatcggcatcggaaccctattaaccgtctgtttgggaggaatgatccttcacgtttttatgcctattgtggaaaaacaattcttatcaaaaaaaagaaggggttaaaaaacctcttctttgaaaaaacgaaacgcaaaacaagctacgtttcgttcaataattttatgataaattaaaatttatagtaccaaaaaatcgcaatttcatttgctgttggaaggttggaataaagcatcgtatcaactgcacctattataaagtgatgtttggcataaaaacgacaagctgaaacattaatatcttgtgtttcaagcataagaccaaaaaagcgattctcctttgcccactcaatcgctttatgtaataatgctgttccaacgcctttttgtctatagtcttttgcaacggcaatgtcctctattagtgcatacccattccagttagaacgaatcttaatccggccgatgcagttgttttcaacataatataaaaaaaccgcttttccctcttcttcaacataactaacatccatttcatcatcttcatattgtttaaaataaggtttagaaaatcgttcctcagtatatgtccaaacaccgttttcaaaagcaggtatcattctcccaaaaacaacgaaaggttcatttggtttattgaaatctttcaaattcatttgagtcattttcttgatcatatcaatcccctcctaaacgagattatattagcatactcgtttcgatcgataacagcttccaaaagggcactctttaaaagaacagcatccattaccttttatataagcgatttttctatttcactgtcttaatggggtatttcaacagaggcttgtggtacagtaaaaaggaatagaaacaagagaaaagaagatgaacctatgcccactaacaataaactcaatgagaaatatcatacttccttcaactcgcccacaaccctgttgactagtatccgtggagagaggaagctttgacacagcttctgccattgatgacatctctattgaagtatccaaaggacaaccaaggatcgctatttgactttttcaagaagaaagtagagtgaataaaggagtgattgagtatgttaacaagagaagatatctttaaacacgtcaaagaaaaatacggtacatcgcctgattacccgtgggagaaatacccaaactatgcttctttgagacatacatcaaacaaaaaatggtacggtcttatcatgaatgttctcccagaaaaattaggcttggatggtcatggcgaaatagatattctaaatctaaaatgtccccctgacataagtgatagcttaagaaacggggaaaatatcttacccggatatcatatggataaggaacattggatttcaattgttttagaacggacagatccagaaggcgaaatctataacttaatcgagcagagctttcatttaaccaagtgaagataaagagtgttccggctaatcaagctgcgaagagtagtgggcactttcattttaggatactgttcttcactcagtccataaacgcaacttagtctatctggtgcgagagtgggagaagaatttctaccaacttcttatggaaaaggatgaatagttatgacaaataacttaaaacagagaagaatcattttagatttagcagttactttagatggttttattgaagggaaaaatggagaagttgattggtgcattatggaccctgatatggggtttactgatttcttaaatcaaattgatactattttatatggcagaaaaagctacgatttatggggacaatatattccaaaagatgaagaccctgatacagaaaaggaaatttgggaattggttcatagtaaaaagaaatatgttttttccagaacacaaaatgagattgataatcaagccatatttataaatgataatattcttgaagaaggaaataaattgaagaaaaagtctggcaaagacatctggctatatggtggagcgagtctcattacaacttttataaatttggggcttgttgatgaatttagattatctattcaccctgttgttttgggagaaggaaaaccgttgtttattgatgtaaaacagaggataaatttaaaaatggtgaatacaagaacattttcctctggcgttgtgcaaatcgtttatcattggaatggctaacattgtaaagtaacactcgacagtaatccttcttattgaactaaaggggaatccataaataatgggttccccttaatatactatggaactatcaatatcaaattttctgtaataaaagaggattgaaaaggacggtgtctcctccattaacatcattaagcattatagtatattttcttctccctcttttaagtaaatcggctaagttttgtgtttataaaaaaacgaaagaaggtgatcctatgcccaataacaataaatccaatagattaatcgctgagaagtctacttattttacttcaacatgctcataaccctgtggactggttcccttggggagaagaagcatatgaaaaagcgaaacgcgaaaacaagcctgttctcgtatctattgggtatagctaacgatggctaatctaaagaacatgctattgatgccatgtttattcattttacaaaaaaggatcaaccttgaattactttcacaagattgatcctttcactcatttagccatgtctccgcgaacgtttatatacattcaagattactagccaacaaataacaatgattcctgcaaaaagtatgagcatattgctatacaaataggtagagtgatcaacgtcaataggcagcagcctatgatctaggaagccgatagataataaaccgcctacaatcgcaatacccgttccctctgataaaaagctcgtgaaattaagcaaactcattccagcgcccgcttccttttctttcaaactgctagacacaactgtagatataactgtttttgtgaaagatagccccccaaaaacaaaaattactataattgtcatgatccatggtgctgcatctataaaaaaggcagcgattaaaaagccggaagaaagcaatgcacttccaatagttagtacatacaaggaacctttccgatcaacaagcaatcccccaatgtaaccaaagatgatgacactcattgttccggggaaaataatgccgcttccaattgctgcagtacttaaatggtgaacatctttcatcatgtaaggaaccatagagacaaatcctgctactgtaccaaatattagtcctccgcaaagggttccaatcacaaaaaagacgtttttccctaattcagggtcaacaaaagggtcctgagctttcctaatgtgttgcacaaatatgaagaaagcaaggatactgatgatcagaaaagaaaatctataagatgttgtaaacagcataaaaaatacgatacctgcagacatcaatataatccctgccatatcaatgtgtcctcttattctctcttcctttttcaacaattttataaggaatggaacggtgataattgttgcagttggaataagcagcaaatacgaccaatggatataatgagcaaccattccgccaatagctggcccaacaccttctcccattgctaccagggacccgatcaggccaaatgctttccccctgttctcttttggaatatagcgcgcaacgacaaccatcacaagagctgggaatgcggctgcaccaattccttgaataaatcgggctagaatgagaataggaaagaaagagtgtccaacaaatccaatgatcgaccctaagccatttaccataatcccaaatagaagcagatttttgatgcccagctggtctgatagctttccatatagagctgttccaatggagaaggttaacataaaggctgtattcacccagtttgcacttgctggcagtttattaaactcgttggcaatatcaggtaatgagacgttcagaaccatttcatttaatacgctgaaaaatgatagaacacaaagccaaatcaaaacttgattgtgccgtaaagttgactgtgaataagacgtattcacaatttcccctccattaatgagggcagacgcagtttatagggtcattgatacgcttccctcttttaattgtaccctgttcattttattgcacttcataataactccccctacatttgattgatatgatcttattatatatagactaaggattaaacttttactttttttataaaaatttgaccagattgcgaaacaaggaaaaacgttattcgcatttatctcaagtggcaaaatgaaacattagtttatattttcacatcacaattatcgataagcagtcagttattgtatttgtttaggataactgtggtaacctgaatataaccaacttaggaagaaggtgatcccatgccaaataaaagtaaacccaatagattaatcgctgaaaagtctccttatttactccaacacgcccacaaccctgtggactggttcccgtggggagaagaagcatttgcaaaagcaaaacgcgaaaacaagccggttctggtcagcatcggttattcgacgacttgtcattggtggcctaggataatcaaatcgtgtggaactccattaaaagataacagaagccattttaaacgataatactatttgttcaaacaatacagtctaccttttatttcattcattttctaaaacctgtaatccgtaaccacgcggtagcaggtttttttatttgcttgacttagagttaactctaaattgtaaactaactttaattaaatgagagggatgatgttgttgtattccattagtaaagctgctgagaagactagtattagttcgtatacattaagatattacgaaaagattgggttacttccaccaccaaaacgaaaaaacagtggaaggcgtttttatacggagactgatattcagttcatgttattcctgaaaagtttaaaggaaacaggtatgtctttggaggatattaatgagtttgtcaaagacggatgcattttggaaaaaatcaattcggatgttaaatcggcacaactctccccatctataaataaacgtattgagattttaaccaagcacttagagaaaatggaaattaaaaaaagggagctggaagaagtgatttctactacaaaaggaaaactggatacatatttttcaattttgaaagaggaagtggaaaacaaatgaaacatttaaatatatacataatgttacttggcttctctattttcacgggagctacttttaatcttgcaaaatatacagttggatatttttctccatcgtcttctgcggcatggcgtttcggtttagcggctgcagtgatgctcatcattttgatttttactgaaggtataaagaagagtcaattacggaaaaacgccgtttcatacattattcttggaattataggaatctttggatttaatgccttgttttttgttggtttaaaatatacatctcccgttaacggagcattaataatggggctgaatcctttattaacagcaattctcgctcgaattatcttaaaggacaacatgacaaaaaaacaagtactcggcatattctttgcattcatcggtgtattgttagtcattacacaaggttctatcgaaaccattaaaaccttatcaatttcaggaggagacttaataatctttacaggtaacgtttgttgggcactttatggcgtacttggacgtcggtttgtaaaggatggtacaccgctatctacaaccacttatacgatggttattggtgctgttagtttaatagtagtttccttatttacatccaaacctgtttctttatcgaacatcccgattggagtttggggggcaattgcttttatggctttctttacaagtgttttgggttacctatggtggaatcaggggattaaagagattggggctagtaaaacatctttatttttcaaccttgttcccgttgtaacgatgattatttcatttgccgttggaacaccaataaaggtatttcaagttattggggctgtgctagttatattaggcgttttaaccgcttcgggggtaatacgtattcctaagtacaatactaaagaacagtcagctatataaagaaatagggagtatttttgagaaaatgtgttaagttaaatatacactaattataggaagaaggtgatcccatgccaaacaaaagtaaacccaatagattaatcaatgagaaatcaccatatttactccaacacgcccacaaccctgtggactggttcccgtggggagaagaagcttttgaaaaagcaaaacgcgaaaacaagccggttctggtcagcatcggttattcgacttgtcattggtgccacgttatggctcacgaaagctttgaagacgaagaaatcgcgcgtcttctcaatgaacggtttgtggcgattaaagtcgaccgggaagagcggccggatgtggattctgtttatatgagaatctgccagctgatgaccgggcagggcggctggccgctgaatgtgtttatcacgcctgatcagaagccgttttacgcgggtacatattttccaaagacgagcaaattcaatcgtcccggttttgttgatgtgcttgagcatctgtctgagacgtttgcgaacgaccgtgagcatgtcgaggatattgcggagaacgccgctaaacatttgcagaccaaaacagccgccaaatcaggcgaaggccttagcgagtcagcgatttcccggacattccagcagcttgccagcgggtttgatacgatctacggcggtttcgggcaggcaccgaaatttccgatgccccatatgctgatgtatttgcttcgttatcatcacaatacggggcaggataacgctttatacaacgtgacgaaaacgctggacagcatggcgaatggcggcatttacgatcatatcggctatgggttcgcccgctattcgaccgatgacgagtggctcgttccccactttgaaaaaatgctgtacgacaatgcgctgctgctgactgcttatacagaagcctatcaggtcacgcaaaacagccgctataaagagatttgtgaacagatcattacgttcattcagagggaaatgactcatgaagacggaagctttttctctgctttagacgcggatacagaaggagaagaaggaaagtactacgtgtggtcaaaggaagaaattctgaaaacgctcggggacgatctcggaacgctgtattgccaagtgtatgacatcactgaagaaggaaactttgaaggcaaaaatattcctaacctcattcacacaaagtgggaacaaatcaaagccgatgccgggttaaccgaaaaagagctcagtctcaaactcgaagacgcaagacagcagctcttgaagacacgcgaggaaagaacctatccgcatgtcgatgataaagtgctcacctcatggaacgcgctgatgatcgcgggtcttgcgaaagcggcaaaggtataccaggagccgaaatatctcagcctagcgaaagacgccatcacatttattgaaaacaaattaatcatcgacggccgtgtgatggtccgatatcgtgatggcgaagtgaaaaacaaaggctttatcgacgattacgcttttctcctatgggcttatctggatctctatgaagcttcgtttgatctatcttttttacaaaaagcgaagaaactgacagacgatatgatcagcttattttgggatgaggagcatggcggattctacttcaccggacacgatgctgaggccttaatcgtccgggaaaaagaagtgtacgacggcgccgtgccttcaggaaacagtgtggcagctgttcagctgctgcgtcttggacaagtcacaggcgacttatcactgatcgaaaaagcggaaacaatgttttccgtgttcaagccagacatcgacgcgtatccgagcggccatgctttctttatgcaaagtgtgttaaggcatctgatgcctaaaaaagaaatcgtgatttttggaagtgcagacgatccagccagaaaacaaatcataacggagcttcaaaaagcctttaagcctaacgactccattctggtggcagagcagcccgagcaatgcaaagacattgcgccatttgcagcagactaccgcatcatagacggcaaaacaaccgtgtatatttgtgaaaacttcgcctgccagcagccgacaacgaatatcgaagaagccatccaaacgttaataagcagcagggattaagacccttgctgcttactttttgatttcttatggtaccataaagcgatccccgcaaacacaagattgaccgctatcgtaaagaaagcctcccacatcgggttcccccgcgtaaccgtaaagagagaaggaattcctccatacacactgtttttttctgtaataaacatacacaaaaacatattattcgcggcatgggcgccaagtgatatttcgatgcttccagttttaatcgtgtaataggtccacacaaaaccaaatgttaaatactcaattcctgcccagacagcgccattgttcatttctggattcgcaaaatgcaatacgccaaacaatcctccgacaatcagtgtcaaaaatagaggatttttcgtcaatctcccgaaagcttgaagcaaaaatcccctgaaaaacagttcctcagctgatgtctgaatcggaaccaaaatgagggcagccgctagcagccagataaagcgtgaggcattaaactcttgcattgaatagctatcaggatgaatcgcaaaatcaatcaattgtacggcgatcatcagcaagaaataagcaataaagccaaaggaaattctccgccaattcatctttgaatttggtgtaatcacagttcggaaaggccgcttcaaaataaagcgcacagccagccaaactcccggaatggcgaataaataaatcacatgggacaaataaagatctacgaggggatcactcagcacagcttcatccaaatcaaacgtgatattgggattcacaataaccgtgaacagtatagcgaaaaggtaagctatattcccgaatacatataaccctaccatcaccaaaaaagcgaaaaaatatctccacaacgtattgtttccttctataggacggataaatgaattcattccttctatgtctcttcctttcaatgagaatattactatatatttgcataaattggtctatgaatctactgttttggaaatcttttaagcaaaattaaaatataaagtgtgaatttagttcttccatctagtgatttgaactctgttgccaatgaaccaagatacttataatagtcctaagaggggaattttcagtcttttcttactactcaaaagggggttttttatgaatacgatcttcaaacaaaagaatacacatcctttctcaaacgcagcgaatcgtttagaccgccttccgatttcacgcgttcatttccaagtgttaaccgctctcggcattgtttatttctttgatctcgcagatttatttaccctcagcaatgtagcgccggcactgatcgagcattggggcatcccgctttcaactattgctaacgtaacggctgcttcgtttttaggcatgtttttaggcgcttcactgggcggacggctgtccgatcgaatcggccgcaaaaaagccttaaatctatttgtctttgttttttcaatcgcatcgctatgcaatgctgcggcatgggacattccatctttaatgacattccgttttctcaccggatttggcgttgcagccgccatggtcattacgaatagctatttggcggaatttttcccttcaagtgtacgtggaaaatatatttctttttgtgccatgattggattgatcggggttccgatcaccaacattgtgtctgcctttgtcattcctcttggttcatggggatggaggctagtatttgtatggggtgccgtcggccttatttattttttctttattcgacggctggaagagtcgcctcgctggcacgaaaatcgcggggaatatgcgaaagccgatgcgatcctcaaccgaattgaggcacaggttgaaaaggagaaaggcccgcttccggcagcatcccagcctaaagtaagcgaaactgttaagcagcatgcaggttacgccggcttattgaaaggcagaaacctcaaaatcaccatcgtattatctgctgtatggatttttgaaacgtttgggttttacggatttgcctcatgggttccaagcctgttaaaaagcaatggtgtcaccatggaaaatacattgtggtataacgtattgcattccgtcggcgctccgcttggcgcactgctcggctccatgatttctgaaagatttcaaagaaaatggattttagctgcgagtgcgtttctgacggccatcgccgggctcttatatggtatgacttttattcccatcatgatcattgtctttggttttatcgtgaatatcacagaacgggtctttacctcgaacttatacgcctatacatctgaaccttatccgactgaataccgctcgtctggcagcggtttagcctatggtcttggccgtttttcaaacatttttggctcattgcttgtcggatttattgccgttcagctcggctatatcagcgtcttcttatttattgggggctgctggctcgcatgctccttgctgttaatcttcttcggtcctaatacgaatgcgaaacagatttaaaaaagtcagtgcggatctgccgcactgatctcattacaattgcttcaaaatcctcgcggggtttccgcctacaacagtattagcgggtacatccttagtgacaacagatccagaagcaatcactgcgttatcaccgattgtcactcccgggttaatcaccgcccggcctccaatccaaacttgatctccaattgtcacaggcttaccgaactccttcccggatttcctttcgatcggatcaagaggatgaccggccgtgtagatatgtacacctggcgcaatcaaacaatgacggccgatacgcacctcacacacatctaaaatgacacagtcaaaattaacaaatgtatgatctccgatatgaatgtgatagccataatcacagcggaatgtcggcaaaatcgtgacttgatccccaaccgaaccgagcagctccttcaaaagctctgtccgcactatatcatcttccggtgtttcgttatattgtctaatcagctgtctcgcatgcttgcgttctagtaatagttgttgatcttccgaattgtataattctccggctgccattttttctttttctgtcctcagcatttaagtcactccatgtcagattgtaatctcgatcaaatttccttcatcatcctcaatcacactttcatagtagccgtctcctgttgtccgcgggccgttgacgacggcaaaaccatccgccttcaaccgagcagtcagttcatccactttctcccggctcccaacggaaaaggcaatatgtgcccagcctgtcattgtttgtgagggcggatcggtcacatttccttttttcataatctccagccttgctccggaaccaaacgtaataaaataagacttaaaatcttttttctcattatgatacaaatcattcgcttcgccattaaaatacgattcataaaaagacttcattcgctctaaatcattgacccagaccgctgtatgttcaatctgcatttcttcctcctccttcgccttcaatgaagttataaggtatgaaatgcatttcagttcaagcttttttcttaaatttatgctgaattttgatatcagcgggttcatcctgcaaaaatagagaaaatgctgcgatgccgagctgctcaagattcaaatcaagcgacggaaaaccaagaacacggctgatagaagtatttccctcgcctatgatttcaacatcccaattactctttttggcaaatagatgaattccagctgccacttcatcactatttgcataaatagcagtcggaaccctcccgctcatataaaaatgttcagctgcccgctcaccatcattcatatcgttgcatccggacagcatatggcggtcttccaaccttccgcagacagctttataggccgcagctttatcagccgtgctcgggctcctatcagcttctctgacacacgtaaaagcaatattctcatgcccgcggccctttaaatagcgaaagctctctgcataagcagcttttctgtcattaaaagcacaaggaacatcaatgtctccggtatcctcacaagcgatgatcggcccatattcctgataagctaaaatgctgtcccaatgattggcgcgggaagtaatgatgagaccgtctattttcttcgttcttaacagctctaaatatttgatttcaatatcggggttataattggtggggagaagggtcgttgcatactcatactgaaaagccgccttggtgattccgttaacgattttatcaaagcagggatgatcgctataaggcagaatcacaccgaccgtatgggttttcccgcgaatgagatcgattgcggttcgatttggcgtataatccaattccttcatgacttgatgaacaagctttctcttttcttcagatacataaggatggtgattcaatacacgcgagacagtcgaaacagatacatttgccagtcttgcgatctcttttatatttgccatctctttctccttttcatataaaaaaagcagtaagtgtaaaatccttactgctatctcatcatatattgatgataagttcaacaggacaatggtcggaacccatgacgtccgctgatatgcaggcatcttcaatctgttccttaagtctttcagaaacaacaaaataatcaatccgccatccgatatttctgtcccgggcgccggcacgatacgaccaccaggaataagcgccttcaagatcaggataaacatgacggaaagaatcaacaaagccagcttctaagaaacgagtgaatgcccctctttcttgatctgaaaatccagcgttattccggttcacctttggatttttcaaatcaatctcctgatgggctacattcaaatcaccgcataaaatcactggttttttctgatccaattcaagaatataagacaataaagcctcttcccattgcatgcggtaatcaatccgctctaatccccttctggaattgggcgtataaacagtcatcacatacacgttttcaaattccagcgtaatcactctgccttcttggtcatgctcttctactccgataccgtagatgacctgcagcggttcttgcttagaaaaaacagctgtgccggaatatccttttttcactgcataattccagtacacatgatagccttcaggctggagatcaacctggccgtcctgtatcttcgtttcctgaagacatataatatctgcatcctcttctttcaaataagagaggaaatccatttttctcatcacagcccgcaggccgtttacattccatgaaatcaacttcatgtttcatcctcccccctataaaaaagagcaagaacccgaaggtccttgctctttacgcatcagcttactcaccgcttacgtatggaagtaaagccatttgacgtgcgcgtttgatcgctgcagtcaatttacgttggtatttagcgtttgttccagttacacgacgtggtaaaattttaccgcgctcagaaacaaactttttaagaagatctacatctttgtagtcgatgtgcgtgataccgttagaagtgaaataacacactttacggcgtttcgcacgaccgcctctgcgtcctcctgccattgtcatttccctcctttctttttcattttaggcgataatcacattagaatggaagatcatcatccgagatgtcaatcggtttgccgtcgttggcaaatgggtcatcattaaagctgttcccctgattgcgtctctggttgttttgatttcccccaaatggattatcattttggcctccgccaaagtactggcctccgccgctgtttccttcgttgtatccacctgaaccagaaccgccgccgtttttcggctcaagaaattgaacactttcagcttggacctctgtcacgaagacacgctgtccttgctggttttcatagtttcttgtttgtaaacggccatctacgcctgcaaggcttccttttttcaagaagtttgcaacgttttcggcttgtcttctccaagtgacacaattaatgaaatcggcctcacgttctccggactggttcgtaaatgtacgattcacagcaagagtaaacgtagcaacagccgcaccgtttggcgtataacgaagctctgggtcttttgtcagtcttccgactaatacaactcggttaagcataagaaagaccaccttttaccattatatatttcaaaattgcttattcttcttctttaacaacaatgtggcgaatgatatcgtcactgatcttagctagacggtcaaattcttgaactgccgcagcgtcagattgaacgtttacgatttggtagaaaccgtcgcggaaatcgttgatttcgtaagcaagacgacgtttaccccaatcctttgttccagtgatctccgcaccgttagaagtcagaacgttgttgaaacgctcgataactgcttttttagactcttcgtcaatgtttgggcggataatgtacataacttcgtactttctcatctgtttgcacctccttttggactaagcggcccataatgggcaaggagcaataattctattactcacaattttatattataccaaagctcttgtccctttacaactgcatcctatacattaaatcggaaatgaataacatctccgtcttggaccacatattctttcccttcaaggcggacttttcctgcctctttagctcctgccataccgccgcccgcaagaagatcctcataagcaactgtctcagcacgaatgaagccccgctcaaagtcactatgaataattcctgcacactcaggtgctttcatgccttttttgaatgtccaagctctgacttcctgttctccggctgtgaaatatgttgcgaggccgagaagagagtaagacgctttgatcagctgatcaagacctgattcttgaatgcccagctcttccaagaacatttgcttttcttcgccttcaagctcagcgatttcagattcgatttttgcacatacaacgataacttctgcgttttcgccggcagcgtactcgcgaatcttcgctacattttcattgccagatggatcagcaacttcatcttcacttacgttggccacgtacaaaataggcttcgaagtcagtaaatggagctgcttcacaagcttttgctgctcctcagtgaattctacagatcgagcaggcttttcactctcaaacgcttctttcagtttagataaaatctcaaactcaaatacagcgtctttatctttttgcttcgcaagcttgctgacgcgtgtaatccgcttttcaaccgtttccatatcagcgaggatcagctcaaggttgatcgtttcaatgtcatcaatcggatcaacctttccggaaacgtgtgtaatgttgtcatcggaaaaagcacggacaacgtggcaaatcgcgtcaacttggcgaatatgagataggaacttgttgccgagtccttctcctttagatgcgccctttacaatccctgcaatatcagtgaattcaaaagcagtcggcacagtcttcttcgggttgaccagctcagtcagcttttgcagacgatcatccggcacctctacaattcccacgttcggatcaattgtacagaacgggtagttggctgattcggcaccggcctgtgtaattgcgttaaatagtgttgattttccgacgttcggcaaaccaacaattccagctgttaaagccattctttcatctcctctatataaaaccgtcattgtatgaacgtattttgaacctagagcaattataaggaggttcactggaaaagacaagctgacaaaaaagcattttcagcctgccaatccctttgattatgcttttttcaagcctactaaacagtcaaaaagcgtacttcccattccattatcagaatttgtatcatttgtcagtgcattgactgaccctccaaaagccgcccacatgccttcatctatattaatcgtcttcgcatgagcctgcttcatcactttcaccttgcccttcaagcgtccgcggtcattaaagataacaacttcgtctccattctgaagatcctgctcagccgctatatctggagaaatatcgacctgaacgtgctgaagcttttcaataaacggcacatgctgtgaatggttggaacgctgcggatgaatggataacagcgtataagggtacttttcagctaactcctcattatggaaaacagattcttcgggcacatttaattgaagcgagccgctaaatcctttttgctcagctagcgacgaagtaaattcaaattttccactcggcgtcaaaaactgataatcatcccacggcacctgttttactggaagagggaggtggcctttttcttttaaacgctcaagtgtcacatcctctgcttccaatgaagaaagccccatctctaaaaattcttgagtgctgtattcaaacagctcgccaaatccaaggcgttttgcaagctctgaccagatccagctgtccgacttcgcttcaccctgcggctccacaagcttcttcccgtactgaacataatgatgatacatactggaatagtagatatcttcttcttcaaaaacagtggcagtcggcaaaacataatcacacagctttgcggtatctgtcataatggaatcaatcgcaaccgtcatgggaaccttttcaaaagcttgtctcaccttatttgtattcggcacctgagtcagcggatttccgcacgtcacaataatcatctcaatcgcaggatcagcagcggtcaacacttcttcagcctgcgtcatcattgaaaaagaacgtgatgttgtttttaattccggcaacgtcagctttgtttttgcaaagctctcgccaatctggacatttccgaaattcgcgccgccgcccttaattccgacatttccgcttgccgcaacgagtgcatcaatccaacgaatcgttcccccgccgtttttatatcgctgcatgccaagccccataaaagtagacaccggaccatcagcatacaaaccggccagatactccagctcctccatagaagtttctgttttcacaataaactcttccagagaaacagttttcaaaagctctttcacatcatcaaaaccgacagaatgctcagaaataaacgtttcatccgttcttcccgtctcaatcagaaccttcaaaacggctgccgcaagccagccgtccattccaggctttacagagatatagcggtcagcaagcttagcagtcgggttgaagatcggatcaatcaccgtaatcgtggcgcccttctttttcacctgctgcaagtgatggtataagtgcatatttgttctggatacatttcttccccacacaacaacatgcttgctgttgtaaatatcaagcgggccgtgaccgtacgaacggccaaaatcccagctttgcgcctcgatgccggagccccagcatatgcttccgacgatttcagtcacgcctccatatccattaaaaaaacgctgatcaagcgcttttaacagaccgttattcgcataatcatggctgtgcaaaacagcagtcgtctccgacgtttccttgatttcccgaagtttatcggcaatttcatcaagtgcctgctcccaagaaatccgcacaaactcgccattttgttttttcattggatagcgaagccgatcaggcgaatttgtttttgtctcaagcattctgccgcggccgcagattttaccttccgtaatcggatggtttggatctccgtccacttttgttacctttccatcaacaacagtcaccaaaaagccgcagctgtcccaacaattcagcggacatgccgactgatgcactttgctcatcgccgtcttctccttaccttctatatgaaaaagcatgagtgtcggcctatttatgaagtaggctcctcatgcttgactagtactttttttagttttctttcaaattctcttctcggaatcataacactgtgagagcatccctcacacttaattcgaatatccattcccatgcgtataattttccagctgttcgctccgcatggatgcggttttttcatttctacgatatcattcaggccaaagtctttatccgccaagacccttcacctcttttcctaaactgctgtatctattgtacaaaaaaactgatcataagagcaatcaagatacccgaaaagaaatacatcctcttatttccatttactcaaaataggatataagagcagacaaactaacaaatacaaattgagcatcccatatatcggatacaagaacgcgatcaaatcagaaaatccgaaagaagtaaaaggcaccattaacactaacaaaatcaacacaatcacccatctcggcatatgaataaacgccatcagccggctggacagccccagcaaaccagctaccgtcgtcgtgtaaatcgccaggcacagcaccgccgtcatacataaaaaaaggaaataaggcgcaccctccagaacggcaaacagcggtatttcaaactgagaaagggagcccgccagctccaccaacgtttcattataaacaaatgagatcacgccaaaaataagaccgcttgccacacttgcgatttttgcttctccgagccctttcatctctttcccaacagaggataaaatcgcaacaactgaaaggatgtttaaagaggtaaacgtaatgctcgcaggccagttatactgctgggacaaatcaatcgtccacgtatggtgatgtgtgctctgaaaggagatcagcgcatataaaagccccgctactaacacaggaatcaaaatactatttatagataatattcctttcacatcccacaaaaacaaacacactgtcacgatgcaaatcagcgtgattccccaccagaaaggaagcttgtacatttgcagggtcacaccgcctccggcaatcatcaccatagtcgtcgaaaacaaataaaaaatgatgaggacatcataaattttcgccagccatggccccattaaatgctccagaaccggcagaaaatgagtggattgaactttaaaactgattttcatcacaatataagacgagaaaatgaacatgattgtaaacagcacaatagcaagtccgctttccgccccaaaaaactgccatatctcctgaccgctcgcataaccggccccgatcaggctccctaatatgagcagcatccacttcattccggctctccacaacactatcacctcatagacaaagttcagcttgtttccgttattgttactatataaataaaagaaagcaaacatgccatattttcatagacatttaaatacaaggtgaaattatcatacgaaatacacataaaaaaagactgctaatggaggcagtctaaaaatatatcatcttgcagtggaatgaaggaatgaacctcattaaccattcctatctataaagtgttttgtaagcaaaccgtagcttgatcatgatcgaggcaatgggggacaatatttataattcacccactaaccattcataataacctctacttttttaaaatctccggtgtcatacacaaagcataaaaaaccgtactgctggatatactgtaaacaaccttacataacgaaacacacaccatagcaattctgttacctactataacaaggaagtgaaacctatgaatcgaaaaggcgggcttttttcctctcaggaacgagtaaaacaatatgtttcacatacagatgcagctgcagcaaaacaaatccaaaccattctttcttcatccttacgtaaagctgccggcaaaccaattgttgtggtttgtatcggaacagaccgttcaaccggtgattcattgggcccactcgtaggaatgaaactcaaacagatgcagctcaccagattccatgtctacggaaccttatctgaccccgtccatgctgtgaacatgaaggataaaatcaatgacattcataaattacataaaaacccatttgttatagcggtcgatgcatgcttaggccgcgttaagagtgtgggttcatttcaaatcggggacgggccattaaagcccggagccggtgtacaaaaagaccttcctgaagtgggagatcttcatattaacggaatcgtgaatgttagcggtttcatggaatattttgtattgcaaaatacaagactcaacttggtcatgaatatggccaatgttctcgcggaaggattgagtttaacagatcggacagagtggaggcaagaacgccttaacccgttgcaaaggctcactgggcgcatataaaacaaaaaccatcttcgcttgaaagatggtttcttcatttacgattctcgttcagataaaagctctaaaatccggtcaaggtcttcattagagaaaaattcaatttcgattttgccttttttcttctgtcttttaatattaactgttgttccaaaataattttggaggtaggattcccgttcttttagaaccgcatctttcacaggttcttttttctttgtttcacgtggaacattctgattcaactgctgaatcagctgctcaagctggcgaacattgagctgctccgcaatcactttttgtaccagcggttcaagcttatttttgttttttaagccaagaagcgtgcgtccatgtcccatagaaagcgtaccttcggcaataagctgctgaatattttctggcagtgtcagcagtcttaaatgattcgcaatatgcggtctgcttttcccaagacgtttggcaagctgctcttgtgtgagatctaagtgtttcaacaaggaatcatatgcctgagcctcttcaagcggagataaatcttcacgctgaaggttttctaataaagcaatttccctcattaacgcctctgataattcacggacaatggccggaactgtatctaaacctgccagctttgccgctcgaaaacgccgttcacccgcaacaatatcatagccttttaaagattttctgacgataagcggctgaagaatgccatgctgcaacacagattcttttagttcagctaatgcctcgtcatcaaagtgttttcttggctgataaggattagggcgtaaatcggcaattttaatttcttcaactgtctcttcagacaaatctacctgattaaataacgcattaatcccttttccaaggcctttagccattcgcagccacttcctttgctaaatctaaatatacttccgcacctcttgaccgcggatcgtataaaatgatgggttttccgtgactcggtgcctcactcagacggacattacgcggaataactgtcttatatactttatccctaaaatactttttaacctcttcaatcacttgaatgccaaggtttgtccgggcatcaagcattgtcagcaatacaccttcaatcattaaatcagtattcaaatgcttttgcacaaggcgtactgtatttaataactggctgagaccctccaaggcataatattcgcactgtacaggaatcacaacggaatccgaggcagtaagggcattaatcgtcagcaagcccaatgacggcggacaatcaatgataatataatcataattttgctttactgcttcaagcgctctcttcaatctcacttctcttgatattgtaggaaccagctcgatctcagcccctgcaagctgaatcgtcgcaggaatcacatccaagttctctactgtcgttgctttaataatatctattacatctgcatcatctactaaaatatcgtacacacactgctctacatcggctttttcaatccctaatccgcttgtcgcatttccctgcggatcaatatctaccagcagaacccttttccctatgtaagccaaacatgccccaaggttgacagacgtcgttgttttgccgaccccgcctttttggttcgtaattgctatgatttttcccacgatgtcacctactttcacatgaacatgtactatcttgcttctattctatcaaaaaaagattaaagcgtttcatttttttcatcattttgttccgaatcagaagggaaataattgaaaattcaagcacgctttatgctttctcttataaattctgcaatttctatgtttttttgacttaaaaaaggaatttcttaaagaaaaaaagaagaagtcacggtacagaacgtggaaacaggatggtgagaaaatgatttatcaaacgaagagagatgtacccgttacgctgatgattgtgtttctcatattactgatacaagcagatgctattgttccttttgtgctgggaaatatgagagtttccggctggatcatttttattctgctgactcttttaaatggactcatcatttggagctttattgacctaaaatatgtattgaaggaacaccatctgatcattaaagccggattgatcaaacatcaaattccttatgaaaacatcgataaagtcgttcaaaaaaagaaactgtggtccggttttcgtctgatcggctctcgccatgccatcacaatatattatcaggggggatggggacatgcagtgatttcaccgcaaaaatctgaagaatttatccccaagctcaaagaaaagaattctaatataataatattcactaaaagtaagtgattaccttttatttaaaatataaaaagctctcctgcttttcaggagagcttctattttggtatgcgaatcgttaattgaatatattcttcaaattcttcttcttccgtattcaattttacaccgctgtcttccaccattgatagtgactggcgaatcgtgttcatcgcaattcttgtatctctgctgaatgctttgcgtctcggctttggctttctcttgccttgctccagcattttcaccacgcggtcttccgtctgctttacatttaaacttttctcaataatctctgtgagcagtgtgacttggagctcaggctgtttcagcggaatcagtgctctggcatggcgctcggtgattttcttctccataattgcctcttggaccggctgaggcagctttaataaccgaagcttattcgcgattgtagactgcccttttcctaagcgctgtgcgagtgcctcctgtgttaaatcatgcagctcaagtagcctagcataagcatgcgcttcctcaatagaagacagttcttcccgctgcaagttttcaattaacgccacagaagcggtttccgtgtcggaaaaatccttaataattgccggaatcttttcccactcaagcgattgcaccgctctccagcgtctttcacctgcaatgagttcgtattggccttcttcttctgtatgcctaacaacaatcggctgaataatgccgtgtgtatgaatggtcattgctaactctttgattttttcatctgagaaaatggtgcgtggctgaaaacggttgggaacgatagcatttaccggtatttccagaatctcttctttgtttgtatcatgttcagcaatctccggctccggttccttctcaccaagcccgaagaaacgagagaatgaatgcttcatgtacctacaccacctttaaaaactgccatttttataattctattttctcatggtttttcctgctgtacatccatcaattttgatgaaaatatgatggtattgtcatatcaggctgtctaaattacccttcaattggcgatttattaggagttcccggttttcttggatacttcttaggtgtattttttattttgcgtatcaccataatattacgatcgctttcttcaataggcagcttaaaagaatggatattctcaagttctcctccaagcgtcgtgattgcttttttgcctgcattcagttcttcttcagctgatgcggcttttaaagcaacaaataaaccgtttttcttcaccagaggcaagcaaagctcactcaaaacagataatctcgcaactgctcgcgctgtcacaatatcatagctttcacgcacgtctttccgttgcccgaacgtttcagctctgtcatggcagaatgttgtattctccaattgcaaagcctcagatagcttttctaaaaacgtgatccgtttattcagtgaatccacgattgtgacattgaggtgcggaaagcatatttttatcggcagacttggaaaacccgctcccgctccgacatcacaaatcgtgttcacctgattgaagtcgacataaaaagtagctgtaatggaatcataaaaatgctttaaatacacttcttttttctctgttattgaagtcagattgattttttcgttccattcaaccagcatgtcgtaatacagctcaaattgctccagctgacggggagaaagggagatccctttttccgccaaaccagaagtgaattcttcaatattcatgccgtcatcctttctattcggctatcttcgcaatgcgtccctgctctaaatacaccaatagaattgaaatgtccgccgggtttacaccggaaatgcgggaagcttgggcaacagacaaaggccgtacatttttcagtttttgacgcgcctcggtcgcaatccccttaattgcgtcataatcaattcgatctggaatttttttattttccatcttcttcagtttttccacttgctgaagagatttttcaatatatccttcatatttcacttggatttctacttgttctgccacgtcttgaggaactggcacttctggcggcgccagttttgtgactgtttcatagttcatttcaggacgcttcatcaagtctgtgccgcgaactccatctttcaattcgcttccgccaagagaacggatatattcttgattttccggagacggcttgataattacagaatgaagacgttttttctccgcctcgatcgccgcttttttcttctcaaaagccgcatagcgctcatcagaaatcaatccaatgcgatgtccgatttctgtcagacgcaaatcagcattgtcatggcgaagaagcaatctgtattccgcacgtgatgtcaaaagacgatatggctcattggttccttttgtcacaaggtcatcaatcagaacaccaatataggcgtcagaacggcttaaaatcacttcttcttttccaagcgcttttcgtcctgcattgattcccgccataatcccttgtcccgcagcttcttcataaccggaagttccgttaatttggcctgcagtgtaaaggtttgtgattttttttgtttcaagtgtcggccagagctgtgtcggtacgattgcatcatactcgatcgcatagccggctctcatcatttgcacgttttcaagtccaggaatcgttgcaagcattctttgctgtacgtcttctggaagacttgtagataaaccttggacatagacttcctgtgtatttctgccttccggctcaaggaagatttggtgacgcggtttatcattaaaacggacaactttgtcttcaatggatgggcagtatcttgggcccgtacctttgatcataccggaatacatcggtgaacggtgcaggttgctgtcaataatctcatgtgtctcagggcttgtatatgtcagccagcaagggagctgatctgtgatatattccactgtttcatatgagaaagcgcgaggcacatcgtcaccaggctgaatttccgttttgctgtaatcaatcgtgtcgcttttaacgcgaggcggcgtacctgttttaaaacgaacaaggtcaaaaccaagttcctccaaatgctcagaaagcttaatagaaggctgctggttatttgggccgcttgagtaagacagatcgccaagaataatacgtcctcttaaatatgtccctgtcgtcatgacaactgctttcgcacgataatgtgcaccggtttgtgtaataacgcctcggcattcgccgtcttcaacgatcagccgctccacaattccttgcagcaatgttaagtttggttctttttcaagcgtatttttcatttcgtgctgatattggaatttgtctgcttgcgcacgcaatgcacgaaccgcaggaccttttcctgtattcagcattctcatttgaatatgcgttttatcgatgtttcttcccatttctccgccgagcgcgtcaatttcgcggacgacaatcccttttgcggggccgccgacagacggattacatggcataaatgcaaccatatctaggttgatggtcaagacaagcgttttggcgccttggcgtgcagatgcgagggcagcctcaacaccggcatgcccggcgccaatcacaatcacatcgtattggcctgcttcataccccatgattctagttcctccttttattattttcctaaacagaattgtgaaaagagctgatcaattaagctttcgtggacagaatctccaatgatttcccctaaaagctcccagcatcttgtaaggtcaatttgcaccatgtcgatcgggacatcctgttcgatgccgctaagcgcatcttcaatggcgcgttttgcttgctgtaaaatagagatgtgacgtgtgttgctgacataagtcagatcaccgctttcaatggcacccgtgtagaacagtgattgaatcgcttcttccagatcattgatgccttcctcttttaaaagagatgtcgtaacaactggacgtccattggcaagctcacggacacgttcagtgtcaatcttcgcctcaaggtcagtcttattcaaaatcacgataacatccatgccctcaacggcttcaaaaagcttcacgtcttcatcagaaagctcttcactataattaagcacaagtaaaatcaggtccgcttcctttagaacctggcgagaacgttcaacaccgattcgctcaacaatatcctctgtttcacgaatacctgctgtatcaaccagacgaagcgggacgccccttacattcacgtattcctcaatcacatcccgtgtcgttccgggaatatcggttacaatggcttttgcctcatgaacgaggctgttcagaagagatgattttcctacgtttggccggccgataatgacggtagaaagaccttcacgtaagatttttccttgctcagaagtcctcagcagcgtctcaatttcctttttcacggcggttgccttttcgactaaaatctgatgcgtcatttcctctacatcatcatactccggataatcgatattcacctcaacatgggccagtgtttctaaaatctcactgcgcaaacggcgcaccaaagcagaaagacgcccttccatttgattcatagcaacgttcattgcccggtccgttttcgctctgattaagtccataaccgcttccgcctgtgaaagatcgattcggccgtttaaaaacgcacgtttcgtaaattcaccaggctctgccagtctcgctccctctcttaatgcaagctgaagcacttggttcacagtcacaattcccccgtgacagttaatctcaatgacatcttctcgtgtaaaagttctcggtgcttttaacactgataccattacttcctcaacgacacgatccgaaggtctgtctacgatatgaccataatgaatcgtatgtgattcgaccgagctgagtgttttccccttcggtcccttataaattttatctgcgatttgaatggcttctggtccgctcaaccgtacaatcgcaatcgcgccttctcccatcggtgtggaaattgccgcaattgtatccatgttgttcacctctctttacttatacttcatctatataaaaaaatttttattatgccaaaactaaaagataacatagtttggttcgaagtggaagatttgttatccacagaaatagaaattcgtcccttattactttaacttatccacatgtgaataacaattaattttatttcctgaacttcctttttatcaacaggatacacctaaaaagaaaaaacttaaacggcaaaaccttgatattactaggaaaagtagatttttcggatacaaaaaaaccgaaatccaatttttatcggacttcggttttatgctatcttttatgggaaataacgagatgacgattttcgccttcacccattgaatatgttttgatctggtggtttgcatatccagaaagagtatcgtgaataatttttctttcgctggacggcatgggctcaagctggatggattttttcgttttcaaaacctggtcagcaagcttgatggccagctggctcagtgtttcttttcttttcaaacgatagttttctgcatccaccgtcacatttttatattggcctggataacggttaagggcaagctgtgtcaaagtttcaagggcgtttaaggtttgtcctcttttcccaatcaacaatgctgccttttcacctgttatatgatatctcactgtctttttgctttcttgaacagtcacatcagacttcccggcaatggcttcggcaatcgtttgaagatataacttcgcttgctgaatcggatcaatcttttcaaccagctttacgatcgcaggctttttaccgaaaatgccgagaaaccctttgtttccctcttcaataacagtaatttctaccttatccttcgttaatcccagctcttgcaatccggactgtactgcttcatcgacatttcgccctgcagcagtcacattcctcactttttctttcctccggctttttgcggctcaggattttttttaatatcaggtcctttaatgaggaaagtttgcgcaatcataaacaagttaccaactacccaataaagagaaagagccgccgggaagttgatcgcaaatacgataatcataattggcataatccaaagcatcatcgccatttgcggattttgctgcgcattgccagccatcatcagtttttgctgaacaaatgtagcgacaccggcaacgataggaagaatatagtaaggatctttttctcctaagtcaaaccataagaagctatgctctgaaatcgcctgggttctcatgatcgcatgatagaatccaattaaaatcggcatctggatcaaaatcgggaaacatcccgccaatggattgacaccatgcttttggaataaagccattgtttcctgctgaagcttttgctgcgttttttgatcctttgagctgtatttttctttaagcttttgcatttccggctgtaaagcctgcatcgctttcgaacttctcagctgcttaatcatcagcggtaaaattaataaacgaattaaaatggtaactagaattattgaaagcccgtagttatctcccgtcaatttcgctacatacgtaatgagctcagacaatggatatactacgtacttgtcccagaaatgcggactatctgcagtgatcggctctttcacactcgagcatccagccaaaagcatgaatacgccaaccatacttaatagcaaccctattctccttttcaacaacatttcctcctataattaatctttacactcttttattgcaaagcatacttgtatgtattttagcatctttcagttttaaatggtgtctttttctgatcaaccagaaaggaagcgcttttaaaagttgtaagaaagcagtggtgatgcctactttgacgaagatttcttatataatgaagactttctgaatagatgctgcagactttttttcgtttcctcatatgtcagctggctcgccggttttctggcaataatgatgtaatccttttccttcagtctctctttctcctcaagaaaggcctgccgaatcaaacgtttgatccgatttcgcatcacagcattgccaatttttttgctgacggaaagcccgacacgcagttcatcattttcaggctgatcaagcgtatataagacaaactggcggtttgcaactgatgtcccatgtttaaacactttttgaaaatcttcatttttctttaaacgatttcgcttcttcaaatgactcactccgatactggctggcagaaacttttaaaatttattatgaacatgagatgcatctgaaccaggaagcatgccccggttcattacgcatcacatctatcttttcccataacgtgaaaaaagaccactgacattattcagtggcctaagctgataatacttttctgcctttgcggcgacggcgtgctaaaactagacgaccgttttttgaactcatacggcttctgaagccatgaactttgctgcgtttacggttattcggttggaatgttcttttcatttatgacacctccctcgaggaatagctgttaaagacagtcttacttattatatttgcgttacctattcattgtcaacttcactagtgcttttatttcttgcaaccataataggataccataccttttcaactttcgaaaccttattttttagattccttaattttacggaaaaaagacaaattcaaacaatttgcccctaaaatcacgcatgtggatatctttttcggctttttttagtatccacagaggttatcgacaacattttcacattaccaacccctgtggacaaggttttttcaacaggttgtccgctttgtggataagattgtgacaaccattgcaagctctcgtttattttggtattatatttgtgttttaactcttgattactaatcctacctttcctctttatccacaaagtgtggataagttgtggattgatttcacacagcttgtgtagaaggttgtccacaagttgtgaaatttgtcgaaaagctatttatctactatattatatgttttcaacatttaatgtgtacgaatggtaagcgccatttgctctttttttgtgttctataacagagaaagacgccattttctaagaaaaggagggacgtgccggaag

SEQ ID NO: 17 - DNA, 1547 bp, Bacillus amyloliquefaciens
tcggagagtttgatcctggctcaggacgaacgctggcggcgtgcctaatacatgcaagtcgagcggacagatgggagcttgctccctgatgttagcggcggacgggtgagtaacacgtgggtaacctgcctgtaagactgggataactccgggaaaccggggctaataccggatggttgtctgaaccgcatggttcagacataaaaggtggcttcggctaccacttacagatggacccgcggcgcattagctagttggtgaggtaacggctcaccaaggcgacgatgcgtagccgacctgagagggtgatcggccacactgggactgagacacggcccagactcctacgggaggcagcagtagggaatcttccgcaatggacgaaagtctgacggagcaacgccgcgtgagtgatgaaggttttcggatcgtaaagctctgttgttagggaagaacaagtgccgttcaaatagggcggcaccttgacggtacctaaccagaaagccacggctaactacgtgccagcagccgcggtaatacgtaggtggcaagcgttgtccggaattattgggcgtaaagggctcgcaggcggtttcttaagtctgatgtgaaagcccccggctcaaccggggagggtcattggaaactggggaacttgagtgcagaagaggagagtggaattccacgtgtagcggtgaaatgcgtagagatgtggaggaacaccagtggcgaaggcgactctctggtctgtaactgacgctgaggagcgaaagcgtggggagcgaacaggattagataccctggtagtccacgccgtaaacgatgagtgctaagtgttagggggtttccgccccttagtgctgcagctaacgcattaagcactccgcctggggagtacggtcgcaagactgaaactcaaaggaattgacgggggcccgcacaagcggtggagcatgtggtttaattcgaagcaacgcgaagaaccttaccaggtcttgacatcctctgacaatcctagagataggacgtccccttcgggggcagagtgacaggtggtgcatggttgtcgtcagctcgtgtcgtgagatgttgggttaagtcccgcaacgagcgcaacccttgatcttagttgccagcattcagttgggcactctaaggtgactgccggtgacaaaccggaggaaggtggggatgacgtcaaatcatcatgccccttatgacctgggctacacacgtgctacaatggacagaacaaagggcagcgaaaccgcgaggttaagccaatcccacaaatctgttctcagttcggatcgcagtctgcaactcgactgcgtgaagctggaatcgctagtaatcgcggatcagcatgccgcggtgaatacgttcccgggccttgtacacaccgcccgtcacaccacgagagtttgtaacacccgaagtcggtgaggtaacctttatggagccagccgccgaaggtgggacagatgattggggtgaagtcgtaacaaggtagccgtatcggaaggtgcggctggatcacctccttt

SEQ ID NO: 18 - DNA, 1547 bp, Bacillus amyloliquefaciens; identical to SEQ ID NO: 17

SEQ ID NO: 19 - DNA, 1547 bp, Bacillus subtilis
tcggagagtttgatcctggctcaggacgaacgctggcggcgtgcctaatacatgcaagtcgagcggacagatgggagcttgctccctgatgttagcggcggacgggtgagtaacacgtgggtaacctgcctgtaagactgggataactccgggaaaccggggctaataccggatggttgtttgaaccgcatggttcaaacataaaaggtggcttcggctaccacttacagatggacccgcggcgcattagctagttggtgaggtaacggctcaccaaggcaacgatgcgtagccgacctgagagggtgatcggccacactgggactgaggcacggcccagactcctacgggaggcagcagtagggaatcttccgcaatggacgaaagtctgacggagcaacgccgcgtgagtgatgaaggttttcggatcgtaaagctctgttgttagggaagaacaagtaccgttcgaatagggcggtaccttgacggtacctaaccagaaagccacggctaactacgtgccagcagccgcggtaatacgtaggtggcaagcgttgtccggaattattgggcgtaaagggctcgcaggcggtttcttaagtctgatgtgaaagcccccggctcaaccggggagggtcattggaaactggggaacttgagtgcagaagaggagagtggaattccacgtgtagcggtgaaatgcgtagagatgtggaggaacaccagtggcgaaggcgactctctggtctgtaactgacgctgaggagcgaaagcgtggggagcgaacaggattagataccctggtagtccacgccgtaaacgatgagtgctaagtgttagggggtttccgccccttagtgctgcagctaacgcattaagcactccgcctggggagtacggtcgcaagactgaaactcaaaggaattgacgggggcccgcacaagcggtggagcatgtggtttaattcgaagcaacgcgaagaaccttaccaggtcttgacatcctctgacaatcctagagataggacgtccccttcgggggcagagtgacaggtggtgcatggttgtcgtcagctcgtgtcgtgagatgttgggttaagtcccgcaacgagcgcaacccttgatcttagttgccagcattcagttgggcactctaaggtgactgccggtgacaaaccggaggaaggtggggatgacgtcaaatcatcatgccccttatgacctgggctacacacgtgctacaatggacagaacaaagggcagcgaaaccgcgaggttaagccaatcccacaaatctgttctcagttcggatcgcagtctgcaactcgactgcgtgaagctggaatcgctagtaatcgcggatcagcatgccgcggtgaatacgttcccgggccttgtacacaccgcccgtcacaccacgagagtttgtaacacccgaagtcggtgaggtaaccttttaggagccagccgccgaaggtgggacagatgattggggtgaagtcgtaacaaggtagccgtatcggaaggtgcggctggatcacctccttt

SEQ ID NO: 20 - DNA, 414 bp, Bacillus
ctcgcggacggacttgtcagcggagccgcacattctacagccgatacggtgcgccctgcactgcaaatcatcaaaacaaaagaaggcgtgaaaaaaacatcaggcgtcttcatcatggcccgcggtgacgagcagtatgtgttcgctgattgcgcgatcaacattgctcctgacagccaggaccttgccgaaatcgccattgaaagcgccaatacggctcaaatgtttgacattgacccgcgcgttgccatgctcagcttctctacaaaaggatcggcgaaatcagacgagacggacaaagtggctgaagccgtgaaaattgcgaaggaaaaagcgcctgagcttacgcttgacggcgaattccaattcgacgctgcatttgtgccgtctgtcgcggagaaaaaagcgccggac

SEQ ID NO: 21 - DNA, 399 bp, Bacillus
aatgtcgtccatctgtatgagcgggactgttccgttcagagacgccatcaaaaggtcattgaagtggcgccgagtgtatctttgcagcctgaattaagggacgaaatctgtgaagcggctgtggcgcttgcgaaaaatgtcggctatatcaacgcggggaccgtggaatttctcgtagcgggcggtgaattttactttattgaagtgaacccgcgcgtacaagtggagcatacgattacggaaatgataacgggggttgatatcgttcagacgcagattctcgtcgcgcagggccacggactgcacagccgcgccgtcaatatcccagagcagaaagacatttttacaaacgggtatgcgatacaatcacgtgtgaccactgaagatccgctgaatgac

SEQ ID NO: 22 - DNA, 384 bp, Bacillus
gagaagtttgactaccgtaaaggatataaattcagtacgtatgcgacttggtggatcagacaggcgattacacgcgccatcgctgaccaggcgagaacaatccgtatcccggttcacatggtggaaaccattaataaattaatccgggtgcagcgtcagcttcttcaggatcttggcagagagccgacaccggaagagattgctgaagacatggatcttacgcctgaaaaagtccgtgaaatattaaaaattgctcaagagccagtttctttagaaacaccgatcggtgaagaagacgactcacatctcggtgattttatcgaagaccaggaagcgacatctccgtcggatcatgcggcatatgagcttttaaaagaacagctg

SEQ ID NO: 23 - DNA, 420 bp, Bacillus
tctgctgttaaaggaactgacctgaaagtcggcgcccaaaacatgcattttgaagaaaacggtgcgttcacaggtgaaatcagcccggtcgctctgaaagaccttggcgtggattactgcgtcatcggccactctgagcgccgtgaaatgttcgctgaaactgatgaaacagttaacaaaaaagcgcatgccgctttcaaacacggcattgtgccgatcatttgcgtaggtgaaacgcttgaagagcgcgaagccggaaaaacaaatgatcttgttgccgatcaagtgaaaaaagggcttgcgggtctttctgaagagcaagttgctgcttccgttattgcgtacgagccaatctgggcaatcggaacaggcaaatcttctacagcgaaagatgcaaacgacgtctgcgcgcatatccgt

SEQ ID NO: 24 - DNA, 384 bp, Bacillus
tctggctggattgttgttgtatttggatggggattgggtgttgccatggcggcatacgcggttggcggcatcagcggtgcccatttgaatccggcgctaacgatagcgcttgcatttgtaggagattttccttggaaagaggttccggtttatattgcggcgcaaatgatcggagcgatcatcggtgcggtgattatttatctgcattacctcccgcactggaagtcaacggatgatcccgctgccaagctgggtgttttctcaacagggcccagcattccgcatacatttgcaaacgttttaagcgaagtgattgggacatttgtccttgtacttggaatcttggccattggggcaaatcaatttacagaaggacttaatcct

SEQ ID NO: 25 - DNA, 471 bp, Bacillus
aacattccgacgatttttgtcagcggtggaccgatggcggcaggaagaacaagtgacgggcgaaaaatctccctttcctcagtattcgaaggggtaggcgcctaccaagcagggaaaatcaacgaaaacgagcttcaagaactagagcagttcggatgcccaacgtgcggatcttgctcaggcatgtttacggcgaactcaatgaactgtctgtcagaagcacttggtcttgctttgccgggtaatggaaccattctggcgacatctccggaacgcaaagagtttgtaagaaaatcggctgcgcaattaatggaaacgattcgcaaagatatcaaaccgcgtgatatcgttacagtaaaagcgattgataacgcgtttgcactcgatatggcgctcggaggttctacaaataccgttcttcatacccttgcccttgcaaacgaagccggcgttgaatactctttagaacgc

SEQ ID NO: 26 - DNA, 414 bp, Bacillus
cttgcagacggacttgtaagcggagctgctcactcgacagctgacactgtacgcccggctcttcaaatcatcaaaacaaaagaaggcgtgaaaaagacttcaggcgtgttcatcatggctcgcggggaagagcaatacgtattcgcagattgcgcgatcaacattgcgcctgacagccaagaccttgccgagattgcgatcgaaagtgccaatacggcaaaaatgttcgacattgagcctcgcgtggcaatgctcagcttctctacaaaaggctcagcaaaatctgatgaaacagaaaaagtagcggatgcagtgaaaatcgcgaaagaaaaagcgcctgaactgacacttgacggcgaattccaattcgatgctgcatttgttccatctgtagctgagaaaaaagcgccggat

SEQ ID NO: 27 - DNA, 399 bp, Bacillus
attgcgcaagcagaacagcttcacggaaaagagctttcttacaacaacattaaagacgcggatgctgcagttcaaatcgttcgtgaattcactgaaccggctgctgttgctgtgaagcatatgaacccgtgcggcgtgggaacaggaaaaacgatcgcagaagcgtttgacagagcgtttgaagcggataaaacatctatcttcggcggcattatcgcgctgaaccgtgaagtggacaaggcaactgccgaagcgcttcacaacattttcttagaaatcatcattgcgccttcattcagccaagaagcgctcgacgtcctgactgcgaagaaaaatctccgtctgctgacgcttgacgtatccgccgctgttcaaaaggaaaaacagctgacatccgtt

SEQ ID NO: 28 - DNA, 399 bp, Bacillus
aatgtcgtccatctttttgagagggattgttccgttcaaagacgccatcaaaaggtcattgaagtggcgccgagtgtctcgctgtcacctgaattaagggatcaaatttgtgaggcggcagttgcgcttgctaaaaatgtaaactatataaatgcggggacggtagaattccttgttgcaaacaacgagttctactttattgaagtaaatcctcgcgtacaagttgaacacacgataacagaaatgattactggtgtcgatattgttcaaactcagatccttgttgcccaagggcacagccttcacagcaaaaaagtaaatattcctgagcaaaaggacatttttacaatcggctatgccattcagtcacgggttacgactgaggatccgcaaaatgat

SEQ ID NO: 29 - DNA, 384 bp, Bacillus
gaaaaatttgattatcgcaaaggttataaattcagtacgtatgctacgtggtggatcagacaggcgattacacgcgccattgccgatcaggcgagaacgatccggattcccgttcatatggttgaaaccattaataaattaatccgtgtgcagcgtcaattactgcaagacttaggcagagaaccaacacctgaagaaattgcggaagatatggatttaacgcctgaaaaagtacgcgaaatcttaaagattgctcaagagccggtatctctggaaacaccgatcggtgaagaggatgactcgcaccttggtgatttcattgaagaccaagaagcaacttcaccttctgaccacgccgcatacgagctattgaaagagcagctg

SEQ ID NO: 30 - DNA, 420 bp, Bacillus
tctgctgtgaaaggcactgacctaaaagtcggcgctcaaaacatgcacttcgaagaaagcggcgcgttcacaggcgaaatcagcccggttgctctgaaagaccttggcgttgactactgcgtcatcggccactctgagcgccgtgaaatgttcgctgaaactgatgaaacagttaacaaaaaagcacacgcagctttcaaacacggcattgtgccgatcatctgtgtaggtgaaacgcttgaagagcgtgaagccggcaaaacaaatgatcttgttgctgaccaagtgaaaaaaggccttgctggtctttctgaagaacaagttgctgcttctgttattgcgtatgagccaatctgggcaatcggaacaggcaaatcttctacagcgaaagatgcgaatgacgtgtgtgcgcatatccgt

SEQ ID NO: 31 - DNA, 471 bp, Bacillus
aatattccgaccatttttgtcagcggggggccgatggcagccggccgcacaagcgacggccgcaaaatttcgctttcttcagtatttgaaggcgtcggcgcatatcaagccgggaaaatcggtgaaagcgacctgcaggagctggaacagttcggctgcccgacgtgcggatcttgttcaggcatgtttacggcaaactccatgaactgtctgtctgaagcgctcggtctggcgcttccgggaaacggaacaattctggcaacttcaccggagagaagagagtttgtgagaaaatcagcggcccaattgatggagaccatcaaaaaagacattaagccgcgcgatattgtcaccgaaaaagcgattgacaacgcctttgcgttagacatggctctcggcggctcaaccaacacagtgctacatacgcttgcgcttgccaatgaagctggggttgagtactctttagaacgc

SEQ ID NO: 32 - DNA, 414 bp, Bacillus; identical to SEQ ID NO: 20

SEQ ID NO: 33 - DNA, 399 bp, Bacillus; identical to SEQ ID NO: 21

SEQ ID NO: 34 - DNA, 384 bp, Bacillus; identical to SEQ ID NO: 22

SEQ ID NO: 35 - DNA, 420 bp, Bacillus; identical to SEQ ID NO: 23

SEQ ID NO: 36 - DNA, 384 bp, Bacillus
tccggatggattgttattgtattcggctggggattgggagtagccatggcggcatatgccgtcggcagcatcagcggcgctcacttgaatccggctttaacgataggccttgcgcttgaaggcagctttccttggaaagacgtccctgtttatattgcgggacagatgatcggagcaatgatcggtgcggttgttgtgtaccttcattatctgccgcattggaaggcgacggatgatccggccgctaaactgggcgttttctcgaccggcccgagtattccccatacatttgggaatatgataagtgaagtcattggtacgtttgtgcttgtgctcggcattttggcaatcggagcgaatgaatttacaaaagggctgaacccg

SEQ ID NO: 37 - DNA, 399 bp, Bacillus
atcgcagcggcaaaacagcttcacggcaaagagctttcttataacaatattaaggacgcggatgcggctgttcaaatcgtccgggaatttacagaacccgcagctgttgccgttaaacatatgaatccatgcggagtcggtacgggagcttcaattgaggaagcattcaataaagcgtatgaagctgataaaacctccattttcggcggcatcatcgcgctgaaccgtgaagttgatcaggcaacggctgaagcccttcacggcatctttttagaaatcattatcgccccttctttcagtgaagaagcgctgaacgtgctgacggcgaagaaaaaccttcgtctgctcacgcttgacgtgaccgcatcaggaaagaaagaaaaacagctgacttccgta

SEQ ID NO: 38 - DNA, 384 bp, Bacillus; identical to SEQ ID NO: 36

SEQ ID NO: 39 - DNA, 399 bp, Bacillus; identical to SEQ ID NO: 37

SEQ ID NO: 40 - protein, 60 aa, Bacillus
MNEKMYRFCTLTWECGLCPTHTCWCAGDLREELEEISLSEFSGGGGAEQRGISQGNDGKL

SEQ ID NO: 41 - protein, 97 aa, Bacillus
VFEMKFKKVLTGSALSLALLMSAAPAFAASPTASPSVENSPISTKADAGINAIKPVPSPNGIFAASFELNGTTWIFKYKYYDSSKGYWVGIYESVDK

SEQ ID NO: 42 - protein, 76 aa, Bacillus
VAAAHAFSANAELASTLGISTAAAKKAIDIIDAASTIASIISLIGIVTGAGAISYAIVATAKTMIKKYGKKYAAAW

SEQ ID NO: 43 - protein, 60 aa, Bacillus
MNEKMYRFAGDLREELEEISLSEFSGGGGAEQRGISQGNDGKLCTLTWECGLCPTHTCWC

SEQ ID NO: 44 - protein, 112 aa, Bacillus
MMNLVKSNKKSFILFGVALAAATLVYALLLTGTELNVAAAHAFSANAELASTLGISTAAAKKAIDIIDAASTIASIISLIGIVTGAGAISYAIVATAKTMIKKYGKKYAAAW

SEQ ID NO: 45 - protein, 94 aa, Bacillus
MKFKKVLTGSALSLALLMSAAPAFAASPTASPSVENSPISTKADAGINAIKPVPSPNGIFAASFELNGTTWIFKYKYYDSSKGYWVGIYESVDK

SEQ ID NO: 46 - protein, 50 aa, Bacillus
LKLPVQQVYSVYGGKDLPKGHSHSTMPFLSKLQFLTKIYLLDIHTQPFFI

SEQ ID NO: 47 - protein, 563 aa, Bacillus
MGYQALYRVFRPQQFEDVVGQEHITKTLQNALLQKKFSHAYLFSGPRGTGKTSAAKIFAKAVNCEHAPVEEPCNECAACKGITNGSISDVIEIDAASNNGVDEIRDIRDKVKFAPSAVTYKVYIIDEVHMLSIGAFNALLKTLEEPPAHCIFILATTEPHKIPLTIISRCQRFDFKRITSKAIVGRMKTIVDAEQLKVEEGALDIIASAADGGMRDALSLLDQAVSFSGEELSVDDALLITGAVSQHYIGKLASALHRKQVSEALETLNELLQQGKDAAKLIEDMIFYFRDMLLYQAAPGLEGVLEKVKVDETFRNLSGDIPAPALYEMIDILNKSHQEMKWTNHPRIFFEVAVVKICQTAQQSAGDIPEVGMLMNKIQQLEQEVERLKTSGVKVQMESAPKEAPRPQKGGKSHYKAPVGRIHEILKEATRPDLEQLKSSWGKLLAHLKQQNKVSHAALLNDSEPVAAAQKAFVLKFKYEIHCKMVAEDNNGVRTNLEQILESMLGKRMDLIGVPEAQWGKIREEFLNDHQQESEGSNEPAEEDPLIAEAKKLVGADLIEIKD

SEQ ID NO: 48 - DNA, 1692 bp, Bacillus
gtgggttaccaagctttatatcgagtatttaggcctcagcagtttgaagatgtggtcggacaggaacacattacgaaaacgctgcaaaatgcccttttgcaaaagaaattttctcatgcatatctgttttctggaccgcggggaacgggaaaaaccagtgcagctaaaatatttgcgaaagcagtcaactgtgagcacgcccctgtagaagaaccgtgcaatgagtgcgcggcatgcaaggggatcacaaatggctctatatcagatgtgattgaaatagatgcggcgtcgaataacggcgtagacgaaatccgcgacatccgtgacaaagtaaaatttgccccgtcggccgttacttacaaggtatatattatagatgaggtgcatatgctctctatcggcgcattcaatgcgcttctgaaaacgctggaagaaccgccggcacattgcattttcatattagctacgactgagcctcataagattcctttaaccattatctccagatgtcagcgttttgacttcaaacggattacatccaaagcaattgtcggacgaatgaagacaatcgtcgatgcagagcagctgaaggtggaagaaggagcccttgatatcatagcgagtgctgcggacggaggaatgagggacgcgctgagcctgctcgatcaagctgtatcattcagcggcgaggagctgtcggtggatgacgctttgctcattaccggagccgtttctcagcactatattggaaaactggcatctgctcttcaccgcaaacaggtttccgaggcattggaaacactgaatgaattgctccagcaggggaaagatgcggccaaactgattgaagatatgattttctatttcagggatatgctcttgtaccaggccgctcccggtttagaaggagtcctggagaaggtgaaggtcgatgaaacgtttcggaatctgagcggtgacataccggcccccgctttatatgagatgattgatatcctgaataaaagccatcaggaaatgaagtggacgaaccacccaagaatcttttttgaagtggctgtcgtgaaaatatgccaaacggcacagcaatccgccggagacatccctgaggtcggcatgctgatgaataagatccagcagcttgagcaggaagtagaaaggctgaaaacctccggtgtgaaggttcagatggaaagcgctccgaaagaagctccgcgtcctcaaaaaggcggaaaaagccattataaagccccggtcggaagaattcatgagatattgaaggaagccacaagacctgatcttgaacagcttaaaagcagctggggcaagctgctggcacacctgaaacagcagaataaggtgtctcatgcggctcttttgaatgacagtgaaccggtggccgctgctcaaaaggcatttgtgcttaaatttaaatacgaaatccattgtaaaatggttgcagaagacaataacggagtccgtacgaatcttgaacagattctcgaatcaatgctcgggaaaagaatggatttgattggcgttccggaagcacaatggggtaaaataagagaagaatttttaaatgatcaccagcaggaaagtgaaggatcaaacgaaccggctgaagaagatccgctgattgcagaggcgaaaaaacttgtcggagcggatttaatcgaaataaaagactaa

SEQ ID NO: 49 - protein, 328 aa, Bacillus
MGYQALYRVFRPQQFEDVVGQEHITKTLQNALLQKKFSHAYLFSGPRGTGKTSAAKIFAKAVNCEHAPVEEPCNECAACKGITNGSISDVIEIDAASNNGVDEIRDIRDKVKFAPSAVTYKVYIIDEVHMLSIGAFNALLKTLEEPPAHCIFILATTEPHKIPLTIISRCQRFDFKRITSKAIVGRMKTIVDAEQLKVEEGALDIIASAADGGMRDALSLLDQAVSFSGEELSVDDALLITGAVSQHYIGKLASALHRKQVSEALETLNELLQQGKDAAKLIEDMIFYFRDMLLYQAAPGLEGVLEKVKVDETFRNLSGDIPAPLYMR

SEQ ID NO: 50 - DNA, 987 bp, Bacillus
gtgggttaccaagctttatatcgagtatttaggcctcagcagtttgaagatgtggtcggacaggaacacattacgaaaacgctgcaaaatgcccttttgcaaaagaaattttctcatgcatatctgttttctggaccgcggggaacgggaaaaaccagtgcagctaaaatatttgcgaaagcagtcaactgtgagcacgcccctgtagaagaaccgtgcaatgagtgcgcggcatgcaaggggatcacaaatggctctatatcagatgtgattgaaatagatgcggcgtcgaataacggcgtagacgaaatccgcgacatccgtgacaaagtaaaatttgccccgtcggccgttacttacaaggtatatattatagatgaggtgcatatgctctctatcggcgcattcaatgcgcttctgaaaacgctggaagaaccgccggcacattgcattttcatattagctacgactgagcctcataagattcctttaaccattatctccagatgtcagcgttttgacttcaaacggattacatccaaagcaattgtcggacgaatgaagacaatcgtcgatgcagagcagctgaaggtggaagaaggagcccttgatatcatagcgagtgctgcggacggaggaatgagggacgcgctgagcctgctcgatcaagctgtatcattcagcggcgaggagctgtcggtggatgacgctttgctcattaccggagccgtttctcagcactatattggaaaactggcatctgctcttcaccgcaaacaggtttccgaggcattggaaacactgaatgaattgctccagcaggggaaagatgcggccaaactgattgaagatatgattttctatttcagggatatgctcttgtaccaggccgctcccggtttagaaggagtcctggagaaggtgaaggtcgatgaaacgtttcggaatctgagcggtgacataccggccccgctttatatgagatga

SEQ ID NO: 51 - protein, 258 aa, Bacillus
MLQPEKVRLEEEIEKVLSLKPDLIVTAAFGQILPKQLLDGPKYGCINVHASLLPELRGGAPIHYSILQGKKKTGVTIMYMVEKLDAGDMISKIEVEIHETDNVGTLHDKLSIAGAKLLSETVPNVISGNIKPIKQDESKATYAPNIKREQERIDWAKPGEEIYNQIRGLNPWPVAYTTLNGQTIKVWASEKVAAKTDAAPGTVIRTEQNGIVVASGNSTALLITELQPAGKKRMKGEDFVRGKNVQPGDVLGAANEEN

SEQ ID NO: 52 - DNA, 777 bp, Bacillus
gtgcttcagcccgaaaaagtaaggctcgaagaagaaatagaaaaagtgctaagcctgaagccggacctgattgttacggcggcattcggacagatcctgcccaagcagctgctggacggtccgaaatacggctgtatcaacgtacacgcgtcactattgcctgaattaagaggcggagcgccgatacattattcgattctccaaggcaagaagaaaacaggcgtgacgatcatgtatatggttgaaaagcttgatgcgggcgatatgatttctaaaatcgaagtggaaattcatgaaacggataacgtcggcacgctgcacgacaaattaagcatagcgggggcaaagcttttgtcagagaccgtcccgaacgtcatctccggaaatattaaaccgatcaaacaggacgaatcaaaagcgacttacgcgcctaacattaagcgtgagcaggagcggattgattgggcaaagcccggagaagagatctacaaccagatcagaggtttaaacccttggcctgtcgcctatacaactttgaacggtcaaactattaaagtatgggcttctgaaaaagttgcggcaaaaactgatgctgcgcccggaacagtcatccgcacggagcaaaacggcattgtcgtcgcatcaggaaacagcaccgcccttttaatcactgagctgcagccggcggggaaaaaacggatgaagggcgaagattttgtaagaggcaaaaatgtgcagcccggtgacgtgttaggagcagcaaatgaagaaaattaa

SEQ ID NO: 53 - protein, 311 aa, Bacillus
MGTPDFSVPVLRTLIEDGYEVVGVVTQPDRPKGRKKIMTPPPVKAEAERHGIPVLQPEKVRLEEEIEKVLSLKPDLIVTAAFGQILPKQLLDGPKYGCINVHASLLPELRGGAPIHYSILQGKKKTGVTIMYMVEKLDAGDMISKIEVEIHETDNVGTLHDKLSIAGAKLLSETVPNVISGNIKPIKQDESKATYAPNIKREQERIDWAKPGEEIYNQIRGLNPWPVAYTTLNGQTIKVWASEKVAAKTDAAPGTVIRTEQNGIVVASGNSTALLITELQPAGKKRMKGEDFVRGKNVQPGDVLGAANEEN

SEQ ID NO: 54 - DNA, 936 bp, Bacillus
atgggaacgcccgacttttcagttcccgtcctgcgcacgcttattgaagacggatatgaagtggttggtgtcgttacgcagcctgaccgcccgaaaggcagaaaaaaaatcatgacgccccctcctgtaaaggctgaagctgaacgtcacggcattcccgtgcttcagcccgaaaaagtaaggctcgaagaagaaatagaaaaagtgctaagcctgaagccggacctgattgttacggcggcattcggacagatcctgcccaagcagctgctggacggtccgaaatacggctgtatcaacgtacacgcgtcactattgcctgaattaagaggcggagcgccgatacattattcgattctccaaggcaagaagaaaacaggcgtgacgatcatgtatatggttgaaaagcttgatgcgggcgatatgatttctaaaatcgaagtggaaattcatgaaacggataacgtcggcacgctgcacgacaaattaagcatagcgggggcaaagcttttgtcagagaccgtcccgaacgtcatctccggaaatattaaaccgatcaaacaggacgaatcaaaagcgacttacgcgcctaacattaagcgtgagcaggagcggattgattgggcaaagcccggagaagagatctacaaccagatcagaggtttaaacccttggcctgtcgcctatacaactttgaacggtcaaactattaaagtatgggcttctgaaaaagttgcggcaaaaactgatgctgcgcccggaacagtcatccgcacggagcaaaacggcattgtcgtcgcatcaggaaacagcaccgcccttttaatcactgagctgcagccggcggggaaaaaacggatgaagggcgaagattttgtaagaggcaaaaatgtgcagcccggtgacgtgttaggagcagcaaatgaagaaaattaa

SEQ ID NO: 55 - protein, 442 aa, Bacillus
MDLWNQALAQIEKKLSKPSFETWMKSTKAHSLQGDTLTITAPNEFARDWLESRYLHLIADTIYELTGEELSVKFVIPQNQDEEDFLPKPQVKKAAKEEPSDFPQSMLNPKYTFDTFVIGSGNRFAHAASLAVAEAPAKAYNPLFIYGGVGLGKTHLMHAIGHYVIDHNPSAKVVYLSSEKFTNEFINSIRDNKAVDFRNRYRNVDVLLIDDIQFLAGKEQTQEEFFHTFNTLHEESKQIVISSDRPPKEIPTLEDRLRSRFEWGLITDITPPDLETRIAILRKKAKAEGLDIPNEVMLYIANQIDSNIRELEGALIRVVAYSSLINKDINADLAAEALKDIIPSSKPKVITIKEIQRIVGQQFNIKLEDFKAKKRTKSVAFPRQIAMYLSREMTDSSLPKIGEEFGGRDHTTVIHAHEKISKLLIDDEQLQQQVKEIKELLK

SEQ ID NO: 56 - DNA, 1329 bp, Bacillus
ttggatctttggaatcaagctctagctcaaattgagaaaaagctaagcaaaccgagtttcgaaacttggatgaagtcgacgaaagcccattcgctgcaaggagataccttaaccatcaccgctcccaatgaatttgccagagactggctggagtccaggtacttacatctcattgcagataccatatatgaattaaccggggaagaattgagcgtcaaatttgtcattcctcaaaatcaggacgaagaagactttttgccgaaaccgcaagtgaaaaaagcggcaaaagaggaaccgtctgattttccccaaagcatgctcaacccgaaatatacattcgacacattcgtcatcggatcgggaaaccgattcgcccatgcagcatcactggctgtggcggaagcacccgctaaagcgtacaaccctttatttatatacgggggagtcggtttaggaaaaacccacttaatgcacgcgatcggccattatgtcattgatcataatccttcagccaaagtggtgtacctgtcttctgaaaaattcacaaatgaattcatcaactcaatccgcgataataaagccgttgatttccgcaaccgctaccggaacgttgatgtacttttgatagatgatattcaatttttagccggaaaagaacaaacacaggaagagtttttccatacattcaacacacttcatgaagaaagcaaacaaatcgtgatttccagtgacagaccgccgaaagagatcccgacccttgaagaccgcctgcgttcgcggttcgaatggggattgattacagacatcacaccgccggatctggaaacgcggattgccattctgagaaagaaagcgaaggcggagggccttgatattccgaacgaggtcatgctttacatcgccaatcagattgacagcaacatccgcgaactggaaggggcattaatccgggttgtcgcctattcatccttaatcaataaagacattaacgcagacctggctgcagaagcattgaaagatattattccgtcttctaagccgaaggtcattacgataaaagagattcagcggattgtcggacagcagttcaacattaagcttgaagatttcaaagcgaaaaagcgtacgaaatcagtggctttcccaagacaaattgcgatgtatctttcaagagaaatgacggattcttctttgcctaaaatcggggaagaatttggcgggagagaccatacaaccgtcattcacgcccacgaaaagatttcaaaactgctgattgatgacgagcagcttcagcagcaggtgaaagaaataaaagaactgcttaaataa

SEQ ID NO: 57 - protein, 446 aa, Bacillus
MENILDLWNQALAQIEKKLSKPSFETWMKSTKAHSLQGDTLTITAPNEFARDWLESRYLHLIADTIYELTGEELSVKFVIPQNQDEEDFLPKPQVKKAAKEEPSDFPQSMLNPKYTFDTFVIGSGNRFAHAASLAVAEAPAKAYNPLFIYGGVGLGKTHLMHAIGHYVIDHNPSAKVVYLSSEKFTNEFINSIRDNKAVDFRNRYRNVDVLLIDDIQFLAGKEQTQEEFFHTFNTLHEESKQIVISSDRPPKEIPTLEDRLRSRFEWGLITDITPPDLETRIAILRKKAKAEGLDIPNEVMLYIANQIDSNIRELEGALIRVVAYSSLINKDINADLAAEALKDIIPSSKPKVITIKEIQRIVGQQFNIKLEDFKAKKRTKSVAFPRQIAMYLSREMTDSSLPKIGEEFGGRDHTTVIHAHEKISKLLIDDEQLQQQVKEIKELLK

SEQ ID NO: 58 - DNA, 1341 bp, Bacillus
atggagaatatattggatctttggaatcaagctctagctcaaattgagaaaaagctaagcaaaccgagtttcgaaacttggatgaagtcgacgaaagcccattcgctgcaaggagataccttaaccatcaccgctcccaatgaatttgccagagactggctggagtccaggtacttacatctcattgcagataccatatatgaattaaccggggaagaattgagcgtcaaatttgtcattcctcaaaatcaggacgaagaagactttttgccgaaaccgcaagtgaaaaaagcggcaaaagaggaaccgtctgattttccccaaagcatgctcaacccgaaatatacattcgacacattcgtcatcggatcgggaaaccgattcgcccatgcagcatcactggctgtggcggaagcacccgctaaagcgtacaaccctttatttatatacgggggagtcggtttaggaaaaacccacttaatgcacgcgatcggccattatgtcattgatcataatccttcagccaaagtggtgtacctgtcttctgaaaaattcacaaatgaattcatcaactcaatccgcgataataaagccgttgatttccgcaaccgctaccggaacgttgatgtacttttgatagatgatattcaatttttagccggaaaagaacaaacacaggaagagtttttccatacattcaacacacttcatgaagaaagcaaacaaatcgtgatttccagtgacagaccgccgaaagagatcccgacccttgaagaccgcctgcgttcgcggttcgaatggggattgattacagacatcacaccgccggatctggaaacgcggattgccattctgagaaagaaagcgaaggcggagggccttgatattccgaacgaggtcatgctttacatcgccaatcagattgacagcaacatccgcgaactggaaggggcattaatccgggttgtcgcctattcatccttaatcaataaagacattaacgcagacctggctgcagaagcattgaaagatattattccgtcttctaagccgaaggtcattacgataaaagagattcagcggattgtcggacagcagttcaacattaagcttgaagatttcaaagcgaaaaagcgtacgaaatcagtggctttcccaagacaaattgcgatgtatctttcaagagaaatgacggattcttctttgcctaaaatcggggaagaatttggcgggagagaccatacaaccgtcattcacgcccacgaaaagatttcaaaactgctgattgatgacgagcagcttcagcagcaggtgaaagaaataaaagaactgcttaaataa

SEQ ID NO: 59 - DNA, 378 bp, Bacillus amyloliquefaciens
gtgtcacagcctaatatgcccaatatcacccctgtcgttacactttccagagacgataccattaaccttcttctttcgtcaattgctatggaagagctgggaatggcacatattctgaatgcggaaggggaaaaaatccaatacgcgctcggaacgattcccggattaacaggacccccgtcaagtcttgcggatattcttaacctgaatgagagcgtccgggatacgcttgacagcttaatgaaacaggagctccttctcggttcaaaattggacagtatctcaaatatccctacattggcgggaccgacgggggccacggggccgacggggccacgggtgcgggtcttcaagggattgttgcttttaatccgctga

SEQ ID NO: 60 - protein, 125 aa, Bacillus amyloliquefaciens
MSQPNMPNITPVVTLSRDDTINLLLSSIAMEELGMAHILNAEGEKIQYALGTIPGLTGPPSSLADILNLNESVRDTLDSLMKQELLLGSKLDSISNIPTLAGPTGATGPTGPRVRVFKGLLLLIR

SEQ ID NO: 61 - DNA, 240 bp, Bacillus amyloliquefaciens
atgcattacataacggcatgcttaaaaatcatcagtgataaagaccttaatgaaataatgaaggaattcaaaaacttgaggaagaaacgaacaaagaagaaggctgtattcagttccatgctcatccgcttgaaccatcagaacgcaaaattatgctttgggagatttgggaaaacgaagaagctgttaaagtccattttacgaaaaagcacacaaaagacgttcaaaaacaagaattaa

SEQ ID NO: 62 - protein, 79 aa, Bacillus amyloliquefaciens
MHYITACLKIISDKDLNEIMKEFKNLRKKRTKKKAVFSSMLIRLNHQNAKLCFGRFGKTKKLLKSILRKSTQKTFKNKN

SEQ ID NO: 63 - DNA, 1212 bp, Bacillus amyloliquefaciens
atgaatgactgtgtcaaaacattcggagaacttccggccgaactttattcctttgcgggaggaaaaggaagcattctctctaaaatgtatcaaagcgggtatcctgtgcctgaagggtttgtgattttgccgtcagcctttcaggacggacagctccgccatcaggcgagagaggctgttgatcaatatgtgaattccatccgcagccgccatgcatctgcgttgtttgccgtacgctcatccgcgctgagcgaggattccgctcaggcttcctttgccggagaattcgatacggtgttgaatgtcagaacagatcaagacatgtccagggcgattgatgaagtccgccggtcggtacagtcagaaagagtaaaagcgtacagcgccgttcagggaatggaagatgagcatgaaatcgcaatcgtcatccagctgatgataccgtctgagatatccggagtgctgtttaccgcagatccgattacggggagcaggcgggagatgacaggcaattacgtctacggtctcggggagcagctcgtttccggggaagccgatgcctattcttttaaactggcacggcccaagaaaaaatatgacggccccggggaatttcgcaaatatgcgtcaaagctctataaactggcgaaaaagctggaaaaagatcttggagggccgcaggatattgaatgggccgccgcgggcgggacattgtatattcttcaatcccgcccgattacgaccttacaagccggaaatctggaaacctatgaatggaacgattctttcagcggtgattttttatggacaaacacaaatataggagaagcgattcccgatgtgatgacgccgctgacatggtcgctcctccggaatctggatgaagagtcgggcatcattccgggctattatgtctggtccggcaatatttgcggcagagcctataacaatatgagccagcctctttccgttctcgccgctttcggtctgaatccgaaaggcggaaaaattggaaaaatgatgagcgatacattgggagaaatcccggcggaaatgaagatacctttatatccgttctcaaagtatgaattattgaagatcatcccgaaaaaactgaaaccgtatctgtcgaaaatgaagcaagcgaaaaaaacatgtcctcctacttggacgaatcaccggagtggtgccggaatattgaggaaaagctga

SEQ ID NO: 64 - protein, 403 aa, Bacillus amyloliquefaciens
MNDCVKTFGELPAELYSFAGGKGSILSKMYQSGYPVPEGFVILPSAFQDGQLRHQAREAVDQYVNSIRSRHASALFAVRSSALSEDSAQASFAGEFDTVLNVRTDQDMSRAIDEVRRSVQSERVKAYSAVQGMEDEHEIAIVIQLMIPSEISGVLFTADPITGSRREMTGNYVYGLGEQLVSGEADAYSFKLARPKKKYDGPGEFRKYASKLYKLAKKLEKDLGGPQDIEWAAAGGTLYILQSRPITTLQAGNLETYEWNDSFSGDFLWTNTNIGEAIPDVMTPLTWSLLRNLDEESGIIPGYYVWSGNICGRAYNNMSQPLSVLAAFGLNPKGGKIGKMMSDTLGEIPAEMKIPLYPFSKYELLKIIPKKLKPYLSKMKQAKKTCPPTWTNHRSGAGILRKS

SEQ ID NO: 65 - DNA, 789 bp, Bacillus amyloliquefaciens
atgtctaagcaaggaaacttccagaaaactatgtcactttttgatcttattttaatcggcatgggagccatattcggttcggcatggctgtttgccgtcagtaacgtcgcctctaaagcgggcccgtcaggcgttttttcctggctgatcggcgggggaatcatcttattgatcggcttggtttatgcggaactgggcgccgcgctgccgcggaccgggggaattatccggtatcccgtatattcacacggacacctggtcggatatttaatttcctttgtcaccattgtggcatacacgagtcttatttctatagaagtaacggcggtccgccaatacgtggcgtattggtttcccggtttgaccgtaaaaggctctgattctccgacaattgccggatggatattgcaatttgcgctgctctgcctgttcttcctcctcaattactggagtgtcaaaacctttgcgaaagcaaacttcattatttcgatttttaaatatgtcgtaccgattacggtaattgttgtactgatttttcattttcacccgggcaatatgaccgttcacggattcgcgccttttggtttcaccggaattcaggccgcgatttccacaggcggcgtcatgtttgcataccttgggctgcatccgattgtggctgtcgcgagtgaagtgcagaatccgaagcggaacattccgattgcattgattgtttgtattatcgtttctactattatttataccgtgctgcagctcacttttatcggggcgatcccggggataccctga

SEQ ID NO: 66 - protein, 262 aa, Bacillus amyloliquefaciens
MSKQGNFQKTMSLFDLILIGMGAIFGSAWLFAVSNVASKAGPSGVFSWLIGGGIILLIGLVYAELGAALPRTGGIIRYPVYSHGHLVGYLISFVTIVAYTSLISIEVTAVRQYVAYWFPGLTVKGSDSPTIAGWILQFALLCLFFLLNYWSVKTFAKANFIISIFKYVVPITVIVVLIFHFHPGNMTVHGFAPFGFTGIQAAISTGGVMFAYLGLHPIVAVASEVQNPKRNIPIALIVCIIVSTIIYTVLQLTFIGAIPGIP

SEQ ID NO: 67 - DNA, 702 bp, Bacillus amyloliquefaciens
atgagaagtttttttgtcacaggaacagataccggcgtcggaaaaaccatcgtttcttgcggacttgccgcggcattcaggcagaaacaggcggatatcggagtgtttaaaccgtttttaagcggcgtgccgcggactcatccggaaagtgacacctcgctgttgaaaaacatgtcacaaaccgcactgtctcatgaagaaatcacgccatttgaatggaaagagccgcttgcgccgtacacggccgccatgcttgaggggaaatccgtgagcatggatgaagtcatggcccactggagtaagatcaaaaatcgtcatgagtgtttcatcgtcgagggggcaggcggcatttccgttccgcttggtgaaaattacttagtcagtgatttgataaaagccttggaattaccggcagtgattgtcgccaggcctgatctcggaaccatcaaccacacatatttaaccgttgaatatgcgaaaaacatgggaatagaggttctcggtattattatcaacggcgtaaagagccggccggggctggacgagaagacaaacccgagcatgattgaaacattatgcaaagttccgattttgggaatcacaccgaagctggatcacgtttcaccggaaaacattcaacacatgattgagaaacatatagatgtttcctctttcatgaatctgacacaaatggggagataa

SEQ ID NO: 68 - protein, 233 aa, Bacillus amyloliquefaciens
MRSFFVTGTDTGVGKTIVSCGLAAAFRQKQADIGVFKPFLSGVPRTHPESDTSLLKNMSQTALSHEEITPFEWKEPLAPYTAAMLEGKSVSMDEVMAHWSKIKNRHECFIVEGAGGISVPLGENYLVSDLIKALELPAVIVARPDLGTINHTYLTVEYAKNMGIEVLGIIINGVKSRPGLDEKTNPSMIETLCKVPILGITPKLDHVSPENIQHMIEKHIDVSSFMNLTQMGR

SEQ ID NO: 69 - DNA, 807 bp, Bacillus amyloliquefaciens
atgagcgctccagaagaaaaaaagatgagaaagcttcctaagtacatacaaatcattcaatttataaaagagaaaataggaaatggagaatggccgatcggaagtaagattccaagccagcgcacgcttgccaaacactttgaggtgaacaggagcacagtcattacagctttagaggaattgacggcggatggattaatcgaaggcagaatgggcaaagggacagttgttacgaacaatacatggacacttttggctaagaattccgctcccgattgggatcagtatgtaacctccggaattcagcagccaagccaaaaaatcgttcaagagatcaataaatcagaatcaaattctgatcttatacagctcagtaaaggagaactttcacatgagatttttcctttagctgttatgaaagagatcatgggaaaggtatcccaaaacatagaggcattcggatatgaggaaccaaaaggatatttgcctttgagagaggcattaagcggctatttaagaacaatcggcattcaagcttctccttcttccattcttattgtttcgggcgcactgcaagccttacagcttatatcaatggggcttttacaaaggggatcgaccgtttatcttgatcagccttcctatctttattcattacacgtatttcaatcagccggtatgaagctgactggagttcctatggatcatgatggacttttgccggaacatatccgcatggcaaggggagaacggggagggctatcttatatacaaatccttgttttcataatccgacaggtattttaa

SEQ ID NO: 70 - protein, 268 aa, Bacillus amyloliquefaciens
MSAPEEKKMRKLPKYIQIIQFIKEKIGNGEWPIGSKIPSQRTLAKHFEVNRSTVITALEELTADGLIEGRMGKGTVVTNNTWTLLAKNSAPDWDQYVTSGIQQPSQKIVQEINKSESNSDLIQLSKGELSHEIFPLAVMKEIMGKVSQNIEAFGYEEPKGYLPLREALSGYLRTIGIQASPSSILIVSGALQALQLISMGLLQRGSTVYLDQPSYLYSLHVFQSAGMKLTGVPMDHDGLLPEHIRMARGERGGLSYIQILVFIIRQVF

SEQ ID NO: 71 - DNA, 411 bp, Bacillus amyloliquefaciens
atgaacagacaagaattgattgcagaagcattaaaagcacgggacacagcgtatgtgccgtattcaaatttcagagtgggagccgctcttcttaccaaagacggaaaagtgtacagaggctgcaacattgaaaatgcggcatacagcatgtgcaactgtgctgaacgcacggcgatattcaaagctgtttccgagggggatacggaatttgcgatgctcgccgtggctgcggatactccgggaccggtttcgccgtgcggagcctgcagacaagtaatttccgagctgtgctcaaaggatatgcttgttattctgaccaacttacaaggacaaataaaagaaatgactgcggaagaattattgccgggcgcattttcatcggaggatttacatgacgaacgaaagctttaa

SEQ ID NO: 72 - protein, 136 aa, Bacillus amyloliquefaciens
MNRQELIAEALKARDTAYVPYSNFRVGAALLTKDGKVYRGCNIENAAYSMCNCAERTAIFKAVSEGDTEFAMLAVAADTPGPVSPCGACRQVISELCSKDMLVILTNLQGQIKEMTAEELLPGAFSSEDLHDERKL

SEQ ID NO: 73 - DNA, 348 bp, Bacillus amyloliquefaciens
atggaaaaacaaaccctcagccatccgattggagagtatcagccggctgaatcgatttcggccggacagaaacaagaatggatcaatgcgctggaacacgctccggctaaactgaaccaagctgtcagagcgatgtcggccagtcagcttgatacgccgtaccgcgaagggggatggactgtccgccaagtggttcaccatctggcggacagccacatgaacggctatacccggtttaaattgagcttaacggagaatgaaccggaaatccgtcctatgatgaaaaaggctgggccgctcttcatgattccaaaaccgccgcttgcggggatgcgcttgagctgttaa

SEQ ID NO: 74 - protein, 115 aa, Bacillus amyloliquefaciens
MEKQTLSHPIGEYQPAESISAGQKQEWINALEHAPAKLNQAVRAMSASQLDTPYREGGWTVRQVVHHLADSHMNGYTRFKLSLTENEPEIRPMMKKAGPLFMIPKPPLAGMRLSC

SEQ ID NO: 75 - DNA, 936 bp, Bacillus amyloliquefaciens
atgcttttccggcagcattttaaacctgtcgatattcacggtcatctgccgtacagccttaatttcggcaaaaacgataagacattttccgattataaccgggagcggtcggaaagaatgaatctcacttgggattttcctgatccgcatgatgttgatggcgatgacggcgaaatcgctttgatgacaagatgggagaaagaattagataagtacggcattgacgtgctgaattttttaacagcagagagcaatgaccggatggcggcgtttattcaagccaatcccgcgaggtttaccggatttgcatatcatcctttggaacaaaaggatgcgtatgaggagctgaaaagagcggttgaagagctcggtctgaaaggatataaactgttcgggccgctgacagacatcgagtttcatgatccgtcgctgaaaaagctgtggacgtatctggctgacaaaagactgcctgtattaattcacttcggacttttagggagagcggggggcattgtcagccatcgcaacatcaacccgctctccatctatcgcgtcgcgagagagtatgctgatataccgttcatcattccgcatttcggcgccggatattatcaggaactgctgcagctgtgctggagctgcccgaatgtgtatattgacacgtccggctcaaatcagtggatgaggtggatgccgtaccggcttgatttggaaattctgtttcgaaagacatctgaattaatcggtgctgaacggatcatcttcgggacggattcgaacggatttccgagaggatatgtatacagatatcttcaggagcaggtgaggacctgccgggaaatcaatatgcgggaagaagatatagaaaacattttcggcaacaacgcgcagacattattgaaaatcgcccggaaagaaaaggaagtaaatacgtga

SEQ ID NO: 76 - protein, 311 aa, Bacillus amyloliquefaciens
MLFRQHFKPVDIHGHLPYSLNFGKNDKTFSDYNRERSERMNLTWDFPDPHDVDGDDGEIALMTRWEKELDKYGIDVLNFLTAESNDRMAAFIQANPARFTGFAYHPLEQKDAYEELKRAVEELGLKGYKLFGPLTDIEFHDPSLKKLWTYLADKRLPVLIHFGLLGRAGGIVSHRNINPLSIYRVAREYADIPFIIPHFGAGYYQELLQLCWSCPNVYIDTSGSNQWMRWMPYRLDLEILFRKTSELIGAERIIFGTDSNGFPRGYVYRYLQEQVRTCREINMREEDIENIFGNNAQTLLKIARKEKEVNT

SEQ ID NO: 77 - DNA, 633 bp, Bacillus amyloliquefaciens
gtgaaacatcataaaacgtaccattcttcatcaattcagacagcagccggccctctattggtagaagggcccgttcctccaaaggacctagcacagtatgagtttcatgaaggcctgacagcctttcgccttcctcatgaacagcacaaagcgttaatcgagatcgccgggcttcctgaaggtcggatcattatcgccagggacggacagacgattatcggctatgtgacgtatttatatcctgatccgcttgaacggtggtctgacggcaatatggaagatctccttgagctcggggcgatcgaggtcgctcccggctacaggggctgttctgtcggaaaaacgttgctgacagtcagcatgatggatgaacagatggaacgctacatcatcatgacgacggaatattactggcattgggatttaaaaggaatgaaaaaagatgtgtgggaatacagaaagatcatggaaaagatgatgaatgccgggggtcttgtctggtttgcaacggatgaaccggaaatcagctctcatccggccaattgtctgatggcccgcatcggcaggcacgtcagtcaggagtcaattgaacagttcgacaggcttcgtttttatcagcggtttatgtattga

SEQ ID NO: 78 - protein, 210 aa, Bacillus amyloliquefaciens
MKHHKTYHSSSIQTAAGPLLVEGPVPPKDLAQYEFHEGLTAFRLPHEQHKALIEIAGLPEGRIIIARDGQTIIGYVTYLYPDPLERWSDGNMEDLLELGAIEVAPGYRGCSVGKTLLTVSMMDEQMERYIIMTTEYYWHWDLKGMKKDVWEYRKIMEKMMNAGGLVWFATDEPEISSHPANCLMARIGRHVSQESIEQFDRLRFYQRFMY

SEQ ID NO: 79 - DNA, 750 bp, Bacillus amyloliquefaciens
atgaaacatgaacatgcagccgttgtactagatttcagtgcaaacgggattgggatcattcgcagcctggcccgaagaggaatcgatgtttacgcatttgacacggagggaccttatcgtatcggaaaatcaagattggcagattgcgggatatgtcccagccctttaacacaagaggaagaactgctgacattcctgactgatttcgggaagcgattccaagcaaagccggttctgtatgcaggttctgatgattatgcgggatttatatctaaattccgcgagacattagccggtttttttttatttttgctcccgagccgctctctgttagaaacggtcttagataaaagcaaagcatatgaattagcggtcaagcataacatcccctgcccgaaaaccttttttccgaacaaccgggatgagctggaagaggccatcgccaatattgacttcccgtgtattttaaaaccggtggccggccatgaatacagaaaaaaagtaaacaaaaaagcaattgtaatgaaggatgccgcacaattgcgcaaggagttcagctcctacagagaaaatggagaactgctcgtgcaggagatcatccccggagacaaccagtgtttttataaagtcgccactttttatgatgaccaaatgaaattaatgggcttattctctctgcaaaagaaccatcaattccctgctgattttggcgcggggcccacgtcgtcagcaaacggcttcctgatttaa

SEQ ID NO: 80 - protein, 249 aa, Bacillus amyloliquefaciens
MKHEHAAVVLDFSANGIGIIRSLARRGIDVYAFDTEGPYRIGKSRLADCGICPSPLTQEEELLTFLTDFGKRFQAKPVLYAGSDDYAGFISKFRETLAGFFLFLLPSRSLLETVLDKSKAYELAVKHNIPCPKTFFPNNRDELEEAIANIDFPCILKPVAGHEYRKKVNKKAIVMKDAAQLRKEFSSYRENGELLVQEIIPGDNQCFYKVATFYDDQMKLMGLFSLQKNHQFPADFGAGPTSSANGFLI

SEQ ID NO: 81 - DNA, 1002 bp, Bacillus amyloliquefaciens
atgatgaacgacgctttaacgagtttggcatgtagtctggcaccggggacggcaattcagggcaaatggaacggcaaatcctacagattgctcaaacagcttggaaaaggggctaacggtattgtatatctggcagaagcatcaggcggacaggtcgctttgaaaataagcagcgacagcatgtctgttacctctgaagtgaatgtcttaaaatccttttcaaaggcccggtcgcaaacgatggggccttctttttttgatgcggacgatgcgtttattccgcagctgaataaaaatgtctctttttacgtgatggagtacatagaagggccgcttcttccgcaatatatcagcagtaagggagcggagtggattccggtgctgatggtgcagcttctttccagcttgtcagtccttcatcagcagggatgggtttttggcgacctcaaaccggaaaatcttattgtaaccggaccgccggctgccatccgctgcattgatgtagggggaacgacaaaacaaggccgcgcgattaaagagtatacggagttttacgacaggggctattgggggtatggaacaagaaaagcagaaccatcctatgacctgtttgctgtcgcaatgatcatgatccactgtgtccagaagaaagagtgcaaaaagtcaggacagccgaaagaacagcttcgttctatcattgaaggccacccgtttctgaataagtataagaaggttctgttttctgctttaaacggccaatatccgtctgcggaagccatgaagcatgacatcctgacggcggggcagagcgccgggagtaaaaggaaagccgccgccaagcctaagccgccgcaatcaaaaccgcggcagggcactgtatctcaaacgcggtataaacctaaacaaaaacccgcaaagcacaatggtttgtttgaaacaacgcttattttaatcagcgttctcgccctttatttcgcttacatcgtcttttttctcatctaa

SEQ ID NO: 82 - protein, 333 aa, Bacillus amyloliquefaciens
MMNDALTSLACSLAPGTAIQGKWNGKSYRLLKQLGKGANGIVYLAEASGGQVALKISSDSMSVTSEVNVLKSFSKARSQTMGPSFFDADDAFIPQLNKNVSFYVMEYIEGPLLPQYISSKGAEWIPVLMVQLLSSLSVLHQQGWVFGDLKPENLIVTGPPAAIRCIDVGGTTKQGRAIKEYTEFYDRGYWGYGTRKAEPSYDLFAVAMIMIHCVQKKECKKSGQPKEQLRSIIEGHPFLNKYKKVLFSALNGQYPSAEAMKHDILTAGQSAGSKRKAAAKPKPPQSKPRQGTVSQTRYKPKQKPAKHNGLFETTLILISVLALYFAYIVFFLI

SEQ ID NO: 83 - DNA, 813 bp, Bacillus amyloliquefaciens
atggcaaatgaaacgtatgaatcattaaacaaacgtttaatcaatatccgccgcgaccttcatgaacaccctgagctgtcaggcgaggaattcgaaacgacgaataaaatccgccgctggctggaggaagaaggaatcacggttcttgatgtgccgaaacttcaaaccggagtgatcgctgaaatcaaaggagataaaagcggccccgtcatcgccgtcagagcggacatcgacgcactgccgatcgaagagaaaacaaaccttccgtttgcttcgcgcaacagcggcgtgatgcacgcatgcggccatgatttccatacggcatctatcctcggcacggctttcttattaaatgagagaaagcatgagctgaaaggaacggtgcggtttatttttcagcccgcggaagaaatcgccgccggagcaagacaggtcattgaagccggcgcgcttgacggtgtatcggcgatattcggcatgcataacaaacctgacctccccgtcggcacggtcggtctgaaagaaggcccgcttatggcgagtgtcgaccgctttgaaatcaccgtgaaaggaaaaggcggccacgccggaatccccgacaacagcattgacccgattcaggcgacagggcagatcatcggcggcctgcaatcgattgtcagcagaaacatcagctcgcttcacaatgccgtcgtcagcatcacaagagttcagggggcagttcttggaatgtcattccggaccatgttgaaatggaaggaaccgtccggacgtttcaaaaagaagcgcgggacgctgttccgaaacatatga

SEQ ID NO: 84 - protein, 270 aa, Bacillus amyloliquefaciens
MANETYESLNKRLINIRRDLHEHPELSGEEFETTNKIRRWLEEEGITVLDVPKLQTGVIAEIKGDKSGPVIAVRADIDALPIEEKTNLPFASRNSGVMHACGHDFHTASILGTAFLLNERKHELKGTVRFIFQPAEEIAAGARQVIEAGALDGVSAIFGMHNKPDLPVGTVGLKEGPLMASVDRFEITVKGKGGHAGIPDNSIDPIQATGQIIGGLQSIVSRNISSLHNAVVSITRVQGAVLGMSFRTMLKWKEPSGRFKKKRGTLFRNI

SEQ ID NO: 85 - DNA, 318 bp, Bacillus amyloliquefaciens
gtgacatggattgcagttgtttcaattgttgtcataagcctgattaagattgtgctgacatgccttcctaccggagcggtggaatggatcctccgcaagtttgaaacccattcaaagctcagtgacgagtccgctgccgtttccctcgggggaaaacgtctggaaggcgaagacaaacgacgggtgattgatgattttaacgaagccgtgtttatcgaacggcattatatatacccagggatgaagagcgttatcttcatccgcaaaacggagccgatccgcttgtcattaagacgagaaaaggaaaaaaagatgtga

SEQ ID NO: 86 - protein, 105 aa, Bacillus amyloliquefaciens
MTWIAVVSIVVISLIKIVLTCLPTGAVEWILRKFETHSKLSDESAAVSLGGKRLEGEDKRRVIDDFNEAVFIERHYIYPGMKSVIFIRKTEPIRLSLRREKEKKM

SEQ ID NO: 87 - DNA, 768 bp, Bacillus amyloliquefaciens
atgcagtatattcgttatgaagaaaagggaaagatcgcagagattgtgctgaaccgtcctgacagttacaacgcgctgaatgaacaaatgctccgggaattggaaaatgcatgcgttatggcagccgacagcgaagcgcttatcgtcctcttgcggggggaaggccggggattttccgcgggcggtgatatccagatgatgacgtcggatcatgattcgggagaatatgaacggctcatgaaaatgattgaatccattacgctgacgctctatgatatgaaaaaaattgtgatagccgccatccacggagccgcggcggggctcgggctgagtttcgcgctgtgcgccgatgtggtgctcgccgaagaaaacgcccgactcgcgatgaatttcatcggcatcggattggttcccgacggaggaggccattatttattaatgagacgcgtcggtgagatcgaagcgaaaaaactgatttggagcggtgaaaaattgccggctgaaaaagcggtgcggctcaagcttgccgacgggctgttcagcggcggccctgcggagggggcacaaccgtatatcgaccgattgctgcatgcgccgctgtcagcgatgattgaaacgaaggctatttatcagagcctccatatcagccggttaaaagacgttttatctcttgaacgaaaggcccaggaaaatatgagaaaaacggatgatcataaagagggcatccgcgcctttttagaaaaacggacgccgcaatttaaccggtaa

SEQ ID NO: 88 - protein, 255 aa, Bacillus amyloliquefaciens
MQYIRYEEKGKIAEIVLNRPDSYNALNEQMLRELENACVMAADSEALIVLLRGEGRGFSAGGDIQMMTSDHDSGEYERLMKMIESITLTLYDMKKIVIAAIHGAAAGLGLSFALCADVVLAEENARLAMNFIGIGLVPDGGGHYLLMRRVGEIEAKKLIWSGEKLPAEKAVRLKLADGLFSGGPAEGAQPYIDRLLHAPLSAMIETKAIYQSLHISRLKDVLSLERKAQENMRKTDDHKEGIRAFLEKRTPQFNR

SEQ ID NO: 89 - DNA, 402 bp, Bacillus amyloliquefaciens
atggcgggagaaggaaagcctttgccgattgaattttaccagagaccgtcagtggagcttgcccctttattgctcggctgtctccttgtgaaggagacggatgagggaacggcttcaggttatatcgtggaaacggaagcttatatgggagcggatgaccgggcggcgcacagtttcggcaaccggcgcacgaaacggacggaaattatgttccatgaggcgggccgcatttatacatacgtcatgcacactcatacattaatgaacgtcgtcgcctcggacatcggcattccgcaggccgtgttaatcagggcggcggagcctcatgaaggacagttcctgatggagagcaggagaccgggcagaccccgagagagtggacaaacggcccgggaaaactga

SEQ ID NO: 90 - protein, 133 aa, Bacillus amyloliquefaciens
MAGEGKPLPIEFYQRPSVELAPLLLGCLLVKETDEGTASGYIVETEAYMGADDRAAHSFGNRRTKRTEIMFHEAGRIYTYVMHTHTLMNVVASDIGIPQAVLIRAAEPHEGQFLMESRRPGRPRESGQTAREN

SEQ ID NO: 91 - DNA, 348 bp, Bacillus amyloliquefaciens
atgaatgaagaatacacatatgcagcagatagtgatatgagaccgtttggacggcccggatttgggtttggacggccgggcttcgggttcgggcggcccggattcggcttcggcttcgggcggccgggttttggatttggccggccttggtttggttatggattcggacggccgtttggtttttacggcggaccgttcttcggagggcttgtcgggggcttgtcggaagcgctttattcaatccgtacctgtacggaggttacggctacccttactatccgtattactactaagacaatcaaaaagggctcctttcaggggcctttttatataggcctaatgtcttga

SEQ ID NO: 92 - protein, 115 aa, Bacillus amyloliquefaciens
MNEEYTYAADSDMRPFGRPGFGFGRPGFGFGRPGFGFGFGRPGFGFGRPWFGYGFGRPFGFYGGPFFGGLVGGLSEALYSIRTCTEVTATLTIRITTKTIKKGSFQGPFYIGLMS

SEQ ID NO: 93 - DNA, 591 bp, Bacillus amyloliquefaciens
atgaacgataacttcaagaaaaccaatcgtatttcaatgcttcagcaattgcagattaatggcagtgaacaaaccattatgattaatggtgatgacaggagtagtccgctgcttttgtttttgcatggcggtcccggcacgcctcaaatcggttatgcgagaaaataccagaatgagctggaaaagcatttcaccgttgtgaactgggatcagagaggggcgggtctctcttattcaaaggaaattccgggttcatctatgactttggatcagctgacagctgacaccattcatctgaccgaacgcttatgcaagcaattcagcaggagaaaaatatatatcgccggctattcgtggggttcagttttggcgcttcaagttcttcaagagaaacctgatttgtattatgcgtatatcggtatcagtcaggtggttaatattcaaaaggaagaaacggaagcctaccggttgatgatggaatggagcaggcaacacaaacatatcctgctgggcaagacgctgagctttatcggagcaccccatgggagaaacagctgcagcgaacgctgtttctgctttgtattgaaatga

SEQ ID NO: 94 - protein, 196 aa, Bacillus amyloliquefaciens
MNDNFKKTNRISMLQQLQINGSEQTIMINGDDRSSPLLLFLHGGPGTPQIGYARKYQNELEKHFTVVNWDQRGAGLSYSKEIPGSSMTLDQLTADTIHLTERLCKQFSRRKIYIAGYSWGSVLALQVLQEKPDLYYAYIGISQVVNIQKEETEAYRLMMEWSRQHKHILLGKTLSFIGAPHGRNSCSERCFCFVLK

SEQ ID NO: 95 - DNA, 1191 bp, Bacillus amyloliquefaciens
gtggctgaaagcttgttaatcagcggtgcggacatcgtaacagaaaaagaaatcatccgaaacggttttctcggtataaaggacggcatcatttcttacgcgggaaaaacaaggccgcaagaaacgtatgagaaggaatggaaggcgcccgagggctcgtatgcgcttcccggaatgattgatatccatattcacggcggatacggcgcggatacgatggatgccgatgttgcggctcttgatacactgtccgcccggctgcccgaagaaggaacaaccgcttttttagcgacaacgatcacacagcagcacgaaaacattgaaaaagcgctcatcaacgccaaaaaatgggcgtattcctcaccggagacccaaaaaggcgctgagttgatcggcattcatttagaaggaccgtttgtctctccgaaaaaggcgggagcacagccgaaacaatggattactcctgctgatgccgggctctttcagaaatgggagcggctctcgggagggctgatcaaaatcgtgacgcttgcgccggaagaagatcctgatttcagcctgatccgttatttaaaaaaccaaaacatcatcccctcaatgggacacacagacgcaggagccgagcttttacaaaaagcggcggatgccggggcggtgcatatgacgcacctctttaacgccatgagctcctttcatcaccgtgagccggggggcatcggtacggctctcgcctgcggccgcatcacggcggagctgatcactgacggcattcattctcatcctctggctgttaagcttgcctatttggcgaaaggaagccaaaacctgatcatgattacagactccatgcgggcaaaagggcttaaggacggagaatacgaattcggcggacaaaaagtcaccgttcgcggggacacggcgcttctctctgacgggacgctggccggttccattttaaaaatgaatgaaggcgcggcgctcatgcgcaggtttacaaactgctcatggccggatatagcaaatatgacatcggcaaatgcggcccgccgcctcggcatattcgaccgtaaaggaagcatcgccgaaggaaaagacgccgacgttgttctgacggacggacagtgcggcgtgctggccacgatttgccgcggaaacaccgcatatatctcaagggaggctgattggacatga

SEQ ID NO: 96 - protein, 396 aa, Bacillus amyloliquefaciens
MAESLLISGADIVTEKEIIRNGFLGIKDGIISYAGKTRPQETYEKEWKAPEGSYALPGMIDIHIHGGYGADTMDADVAALDTLSARLPEEGTTAFLATTITQQHENIEKALINAKKWAYSSPETQKGAELIGIHLEGPFVSPKKAGAQPKQWITPADAGLFQKWERLSGGLIKIVTLAPEEDPDFSLIRYLKNQNIIPSMGHTDAGAELLQKAADAGAVHMTHLFNAMSSFHHREPGGIGTALACGRITAELITDGIHSHPLAVKLAYLAKGSQNLIMITDSMRAKGLKDGEYEFGGQKVTVRGDTALLSDGTLAGSILKMNEGAALMRRFTNCSWPDIANMTSANAARRLGIFDRKGSIAEGKDADVVLTDGQCGVLATICRGNTAYISREADWT

SEQ ID NO: 97 - DNA, 246 bp, Bacillus amyloliquefaciens
ttgctgcgcgccttaaaactgtcactcgcgatgctgattattatacttgcggccgccgcatttacgtatgcggaacatacctccgtcatacagccggttatgctcgtgtttctcggtgcggtcatgttcattcaggggctggaggaaaaacggaaagaaaacgacggctccgggaaattcaatatctataccgccgtttttgtatggtcgatctccttaatcggttttacgcttcacgcgatctga

SEQ ID NO: 98 - protein, 81 aa, Bacillus amyloliquefaciens
MLRALKLSLAMLIIILAAAAFTYAEHTSVIQPVMLVFLGAVMFIQGLEEKRKENDGSGKFNIYTAVFVWSISLIGFTLHAI

SEQ ID NO: 99 - DNA, 837 bp, Bacillus amyloliquefaciens
ttgtctaaaacatatcaaaagtggatcgtattgggattattttttatcgtactgtgcacaggccgctcggcttttgcggcgacatctcagactcagacgggaggcctcgggaatatcggttttttccacgattacctgatcgagccgttttcggcacttttaaaaggggtggcgggcctgttccacggtgagtacggactgtcgattattctggtgacgattatcgtccggatcgttgtattgcctttgtttgtgaaccaatttaagaaacagcgggtgttccaggaaaaaatggctgtgatcaaaccgcaggtcgacagcattcaggctaaaatgaaacaaacgaaagatgcggaaaaacaaaaagaactgcaaatggaaatgatgaagctttaccgtgagcacaatctgaatccgatggcaatgggatgtcttccgatgctggtgcaattcccgattttgatcggtttttattacgccatccgctcaacgccggaaattgcttcacactcatttctgtggttcagcttagggcattctgatattcttgtatcactgtgcgcgggggccatgtatttcttacaggcttatatttcccaaaaattaaacgagaaatattcaccggctgctcaaaatccggccgcgatgcagtcagcaaaaatcatggtctttattttccctgtcatgatgaccgttttttcgcttaacgtaccggctgcgctgccgctttactggtttacaagcggactgtttttgacagtgcagaacgtacttttacagcagacgcatcataaaaagaaacaggctgcggctcaggcggagcccgccaaatcataa

SEQ ID NO: 100 - protein, 278 aa, Bacillus amyloliquefaciens
MSKTYQKWIVLGLFFIVLCTGRSAFAATSQTQTGGLGNIGFFHDYLIEPFSALLKGVAGLFHGEYGLSIILVTIIVRIVVLPLFVNQFKKQRVFQEKMAVIKPQVDSIQAKMKQTKDAEKQKELQMEMMKLYREHNLNPMAMGCLPMLVQFPILIGFYYAIRSTPEIASHSFLWFSLGHSDILVSLCAGAMYFLQAYISQKLNEKYSPAAQNPAAMQSAKIMVFIFPVMMTVFSLNVPAALPLYWFTSGLFLTVQNVLLQQTHHKKKQAAAQAEPAKS

SEQ ID NO: 101 - DNA, 2784 bp, Bacillus amyloliquefaciens
atgtcagatcaatttacgagccgtgaagaacgccgtaaggcaaggcagacgaaaagcactaagccctcttcaccgaaaaaaggcaagaaacagcgtaaaggcggtttattcaaaaagattgtgctgtccttggttattctgtttgtccttggcatagtcggcggagcggcggcatttgccgttttggtttccggcgcgccgtctttggacgaagccaagctgaaaacgccttactcttcaacgatttacgataaaaacggaaaagaaatcgcggaagtgggcggtgaaaaacgaacctacgtcccgattaaggatatacccgatgttgtgaaagaagcatttatcgcaactgaagacgcccgtttttataagcaccacggtatagacccgattcgtatcggaggcgctttggtcgccaactttacggatgggttcggttcagagggaggaagcacaatcacccagcaggttgtgaaaaactcgcttttgacccatcagaaaacgattaaacggaaagcacaggaagtgtggctttccctgcagctggagcgccattattctaaagatgaaatcttagaaatgtatttaaacagaatttatttctcaccgcgcgcctacggcgtcggaaaagcggctgaagaattcttcggcgtaaaagacttgagcaagcttacggttgaacaggcggcaacgcttgccggaatgccgcaaagcccgaccggatataacccggttaaaaacccgaaggcttccgaaaaacgacgaaacatcgttctcagcttaatggaaaaacaaggattcatttcaaactctgaataccaaaaagcgaagaaagtgtccatgaaagatgaaggcgtcgtcagccaaaaggaatacgataaaaaggacacaaataaatacagcgcttttgtcgaagaagttatgaaagaaattgagacaaaagaaaagaaagacgtcgatatttcaactgacggactgaaaatttacacgactcttgatacgaaagcacaagattatcttgatcaattgatgaacggcgatacagccggatttaccgaaggcatgcagggcggcgtcacgctccttgatacgacaaacggagaaatccgcgccatcggggcaggacggaacagaactaccgggggattcaattatgcaacacaaggtaaaacccagcccggttcgacgataaaaccgattcttgattacggaccggtcattgaaaataaaaaatggtcgacgtatgaacagattgacgactcagcttatacgtactctgacggcacaccgattcatgattgggacaataaatacagaggccagatatcaatgcgagaggccctcgcagactcacgtaatattcctgctttaaaagcataccaagcagcaggaaaagatcatgccgtcgacttcgcaaacgacttaggattgggattaaacaaagatcaagtatatgaaccctactctatcgggggatttggtgagggtaaccgcggtgtatctactatgaccatggcaggcgcctacagtgcgttcggaaataacggaacgtacaacgaaccgcacgcggtcacatcgattgaatttaatgacggcactaagcttgatttaacaccgaaaccgaaaagtgctatgagcgactacacagcgtttatgattacagatatgctcaaatcagctgtcgaatcaggaacaggtaaactggctcaggtggcgaacgtggaagtcgccggtaaaacgggtacgaccaactttactaaagaggacattcaaaaatataacattgctccaggcggagtcccagactcatggtttgtcggatacacccctcaatatacagcggcggtttggaccggagttgagtctggcaacaaagcaggcaagaaatcactgtcttctgcagaccagcaagtcgcaaaacggattttccaaaagctgatctcatacgttgatgacggtaaaggaagcttcaagcagcctgacagcgttgtaaaagaaacagttgagaaaggctcgaatcctgccgctttagccggaccgaatacgccggatgataaaaaagtgacggagtacttcgtgaaaggaacgcagccaactgccgtttctaaaacgtacacgaaagaaaaagccgataaaccgacaggattgcaagtgaaatacgacaaagataaaaaatcattaaccttaagctgggattatgacggtgatgcaacattcaatgtcaaacaatccgttgacggcggaagctacagtgacattcaaaacagttcggcaaaagaagccgtcgtctcaaatgtcacgccaggctccacatacagcttccaggtgacagcggaaaacgatgacggaaaaagcgatacggcatcagcatctttcaaagtcccgaaagatgaagaagacgatgcggataaagataaagcgactgacgatgaacagaagactgatgaagataaagataaggacaagacgcaaaccgatgattcaaacaaagatgacgatcagacagatacgtctgacggatcggatcaaacaccaactgatgacccggataaaaatcaggatcaatccgataaggatcaaacagataacaacaatcagaatcagcccggcaacgggaccgataacaacggacagcaagataacggctctgataatgattccgattccggttcagacggctcaaataaacctgacagcggtcaaacggataaaaaccaagactcatcttcaactatcaacgggcagtccaattcgtcaaccatccagtcaaatcccgctcattag

SEQ ID NO: 102 - protein, 927 aa, Bacillus amyloliquefaciens
MSDQFTSREERRKARQTKSTKPSSPKKGKKQRKGGLFKKIVLSLVILFVLGIVGGAAAFAVLVSGAPSLDEAKLKTPYSSTIYDKNGKEIAEVGGEKRTYVPIKDIPDVVKEAFIATEDARFYKHHGIDPIRIGGALVANFTDGFGSEGGSTITQQVVKNSLLTHQKTIKRKAQEVWLSLQLERHYSKDEILEMYLNRIYFSPRAYGVGKAAEEFFGVKDLSKLTVEQAATLAGMPQSPTGYNPVKNPKASEKRRNIVLSLMEKQGFISNSEYQKAKKVSMKDEGVVSQKEYDKKDTNKYSAFVEEVMKEIETKEKKDVDISTDGLKIYTTLDTKAQDYLDQLMNGDTAGFTEGMQGGVTLLDTTNGEIRAIGAGRNRTTGGFNYATQGKTQPGSTIKPILDYGPVIENKKWSTYEQIDDSAYTYSDGTPIHDWDNKYRGQISMREALADSRNIPALKAYQAAGKDHAVDFANDLGLGLNKDQVYEPYSIGGFGEGNRGVSTMTMAGAYSAFGNNGTYNEPHAVTSIEFNDGTKLDLTPKPKSAMSDYTAFMITDMLKSAVESGTGKLAQVANVEVAGKTGTTNFTKEDIQKYNIAPGGVPDSWFVGYTPQYTAAVWTGVESGNKAGKKSLSSADQQVAKRIFQKLISYVDDGKGSFKQPDSVVKETVEKGSNPAALAGPNTPDDKKVTEYFVKGTQPTAVSKTYTKEKADKPTGLQVKYDKDKKSLTLSWDYDGDATFNVKQSVDGGSYSDIQNSSAKEAVVSNVTPGSTYSFQVTAENDDGKSDTASASFKVPKDEEDDADKDKATDDEQKTDEDKDKDKTQTDDSNKDDDQTDTSDGSDQTPTDDPDKNQDQSDKDQTDNNNQNQPGNGTDNNGQQDNGSDNDSDSGSDGSNKPDSGQTDKNQDSSSTINGQSNSSTIQSNPAH

SEQ ID NO: 103 - DNA, 948 bp, Bacillus amyloliquefaciens
atgagtggcgataaaaaacatctggtcatcatcggcggcggcataacgggactagccgccgccttctacatggaaaaagaaatcaaggaaaaacagctgccgcttgaggtcaccctgatcgaagcgggcccgagagcgggcggcaaaattcagacggcgcataaagacggctacatcattgagcgggggccggattcttttttagaaaggaaaaaaagcgcgccgcagctcgttaaggatttggggcttgagcatctgctcgtcaacaatgcgaccggccagtcttacgtgctcgtcaatgagacgcttcatccgatgccgaagggcgcggtgatgggcattccgaccaaaatcgctccgttcatctccaccggtttattttctgtacccggaaaagcgcgggcggcgcttgactttgtcctgcctgcgagcaaaccgaaggaagatcagtctctgggtgaatttttccgcagacgcgtcggtgacgaagtcgttgagaatttaatagaaccgctattatcagggatttatgccggagatattgataagctgagcctcatgtccacgtttccgcaattctatcagactgagcaaaagcacagaagcctgattctcggtatgaaaaaatcacgtccgcagccttcgggacagcagctgacggccaaaaagcagggccagtttttaacggtgacgacaggacttcaaacgttggtggaggagctggaaaagcagcttacgctgacaaaggtgatgaaaggaacgaaagtcacccatatcggccgcgaggagaaaggatattccgtgacgcttgataatggcaaagtgctctatgcggaaggatgcatagtgacagcccgcataaagccgcggcgaaaatgctttctgatctgccggcggtttcatgtctcaaagatatgcattctacgtccgttgccaacgtcgccttag

SEQ ID NO: 104 - protein, 315 aa, Bacillus amyloliquefaciens
MSGDKKHLVIIGGGITGLAAAFYMEKEIKEKQLPLEVTLIEAGPRAGGKIQTAHKDGYIIERGPDSFLERKKSAPQLVKDLGLEHLLVNNATGQSYVLVNETLHPMPKGAVMGIPTKIAPFISTGLFSVPGKARAALDFVLPASKPKEDQSLGEFFRRRVGDEVVENLIEPLLSGIYAGDIDKLSLMSTFPQFYQTEQKHRSLILGMKKSRPQPSGQQLTAKKQGQFLTVTTGLQTLVEELEKQLTLTKVMKGTKVTHIGREEKGYSVTLDNGKVLYAEGCIVTARIKPRRKCFLICRRFHVSKICILRPLPTSP

SEQ ID NO: 105 - DNA, 1626 bp, Bacillus amyloliquefaciens
gtgctgactggatttacgccatggccggaagaatgggctgaaaaataccgaaaagacggctgctggaagggtgagacgttcggaggaatgctgaaagagcgcgcggctttatacggaaatcaaactgccgtgacgtgtaaagatgtacattggacctacaaagaattagatgaaagggccgatcgtttagcggcggggctgcataagctcggaattcaaaaggaagaccgcgttgtcgttcagctgccgaatatcgctgagttttttgaagtgattttcgcgctgttccgactcggagcactgcccgttttcgcgctgccttctcatagaagcagtgagattacgtatttctgcgagtttgcagaggcgaaagcatacatcattcctgatacgcattcaggttttgattacagggcgcttgccagacaggtgaaagacaaacttccggatttggcgcatgtcattgtggccggcgaagctgaagagtttcaggaactgagcagcctgcatagagagcctgttcagctggaagaggtaagcccggcggaagtcgcttttttacagctttcaggaggcagtacggggctgtccaagctgattccgcgaacacacgacgattacatatacagtttgcgcctcagcgcggaaatatgcggcttggatcatcacagcgtttatttggccgctctgccgacagcgcataattatccgctcagctcgccgggtgtgctgggaactttatatgccggaggccgtgttgttctgtcaccgacgccgagtccggatgactgcttcccgttaattgaaaaagaacgtgtcacgattacagcgctcgtcccgccgcttgcgatggtgtggatggacgcatccggttcgcgaagtgatgatttatcaagccttcaagtgctgcaggtgggaggcgccaaattcagtgctgaggcggcccgccgcgtaaagagcgctttcggatgcacccttcagcaggttttcggaatggcggaaggattggtgaattatacgagactggatgatcctgaagagatcattgtcaatacgcaaggcagaccgatgtcaccttttgatgaggtaagggttttagacgatgacgggcgggatgtcgcccccggagaagcgggacatttgtttacacgcggcccttacacgattcgcgggtattataaagcgcctgaacataatgaaagatcattcacagccgacggattttatcagaccggcgatatcgtcaaactgacggcggacggctatatcatcgttgaaggacgtgcgaaagatcaaatcaatcggggcggcgaaaagattgccgctgaagaggtggaaaatcaccttctggcccatcctgccgttcatgatgcggccatggtttcaatgccggatgattttctcggagagcggtcctgtgtgttcgtcattccgaaaggagaagcgccgaaaccgggagagctgaaagcgtttttacgggagcgcgggctggcggcatataaaattcccgaccgggttgaatttatcgcttctttcccgaaaaccggcgtcggcaaggtcagcaaaaaggaccttcgcgaaacgatcgcccaaaaattgaagcctgctgaaatcaaacaatcttaa

SEQ ID NO: 106 - protein, 541 aa, Bacillus amyloliquefaciens
MLTGFTPWPEEWAEKYRKDGCWKGETFGGMLKERAALYGNQTAVTCKDVHWTYKELDERADRLAAGLHKLGIQKEDRVVVQLPNIAEFFEVIFALFRLGALPVFALPSHRSSEITYFCEFAEAKAYIIPDTHSGFDYRALARQVKDKLPDLAHVIVAGEAEEFQELSSLHREPVQLEEVSPAEVAFLQLSGGSTGLSKLIPRTHDDYIYSLRLSAEICGLDHHSVYLAALPTAHNYPLSSPGVLGTLYAGGRVVLSPTPSPDDCFPLIEKERVTITALVPPLAMVWMDASGSRSDDLSSLQVLQVGGAKFSAEAARRVKSAFGCTLQQVFGMAEGLVNYTRLDDPEEIIVNTQGRPMSPFDEVRVLDDDGRDVAPGEAGHLFTRGPYTIRGYYKAPEHNERSFTADGFYQTGDIVKLTADGYIIVEGRAKDQINRGGEKIAAEEVENHLLAHPAVHDAAMVSMPDDFLGERSCVFVIPKGEAPKPGELKAFLRERGLAAYKIPDRVEFIASFPKTGVGKVSKKDLRETIAQKLKPAEIKQS

SEQ ID NO: 107 - DNA, 1173 bp, Bacillus amyloliquefaciens
atgaaagaaatgttaaaaataagcggcatcagttacgaaatcaacagcgttcccctttttgaacagatcagcgcgagtgttcagcaaggcgacatcatcggtgttatcggtaaaaacggcgccggcaaatctttattgctgcaattgatctgcaataaaaaagcgccgtcacaaggacagatccagatgatgcaagatgtgaacatatatatggtggaacaagaaacggaagcttatgattccggccatccggagcctgcggaggcagccttgttagaaaagtggaacgtgcccgcacgcgccttttcgcaattaagcggcggagaaaaattgaaagcccgtcttgccaaaggtttctcctcctcaagcggccttttgttattagatgagccgacgaaccacctcgatcagcacagtttagaaatactgcttaatcagatcaagaattacaaaggcaccattattttcgtttcacatgatcgtgcttttatagatgcggcggcgacaaaaatctgggccatcgaaggaaagaaactcattgaacataaagggaattattcaagctatatggaggtccgcaaacagagaaggctgacacagcagcgggaatatgagaatcagcagcatatgatcagacggattgaagctcaaatgaacgagctgagcgcctggtcaaaaaaagcccacgcccaatcaacgaaaatagaaggctttaaagaatatcaccgcgtaaaagcaaaacgcacggacgcccagattaaatcaaagcagaagcgtcttgaaaaagagcttgaaaaagcgaaagcagaaccggttgaagcggagtatgaagtccgtttttccattgagcaccgcaaaaaagcgggaaagcgttttttagaagtaagtgatgtcacaaagtcatatgaaggccgaacgctttttaaaaacgtgaatttcactgtgatgcacggtgaaaagatcgcgattacaggcccgaacggcagcgggaaaacaacattattgaaggtcatcctcggtcaggaaaaagcgcagggcggcatatggatttctccgtctgcaaacgtcggctatttaacccaggaagtattcgaccttccgcttgataaaaccccgaacagcttttttacaaagaaacgttcgaagcaaggggaaatgttcaatccctcatga

SEQ ID NO: 108 - protein, 390 aa, Bacillus amyloliquefaciens
MKEMLKISGISYEINSVPLFEQISASVQQGDIIGVIGKNGAGKSLLLQLICNKKAPSQGQIQMMQDVNIYMVEQETEAYDSGHPEPAEAALLEKWNVPARAFSQLSGGEKLKARLAKGFSSSSGLLLLDEPTNHLDQHSLEILLNQIKNYKGTIIFVSHDRAFIDAAATKIWAIEGKKLIEHKGNYSSYMEVRKQRRLTQQREYENQQHMIRRIEAQMNELSAWSKKAHAQSTKIEGFKEYHRVKAKRTDAQIKSKQKRLEKELEKAKAEPVEAEYEVRFSIEHRKKAGKRFLEVSDVTKSYEGRTLFKNVNFTVMHGEKIAITGPNGSGKTTLLKVILGQEKAQGGIWISPSANVGYLTQEVFDLPLDKTPNSFFTKKRSKQGEMFNPS

SEQ ID NO: 109 - DNA, 1533 bp, Bacillus amyloliquefaciens
atgaatcgggtcttccgtaataccattttttatttacttattttattagtagtaatcggggttgtgagttacttccagacctcaaacccgaaaacagaaaatatgtcgtacagtacgtttatcaagaacctcgatgaagggaaagttgatagcgtatcggttcagcctgtcagaggtgtttatgaggtaaaaggacagctgaaaaaatacgacaaagaccagtactttttaacacatgttcctgaaggaaaaggagcagaccagatatttgacgcaattaaaaagacggacgtaaaagttgatcccgcacaggaaacaagcgggtgggtgacgttcttaacgacgatcattccgtttgtcatcatctttattctgtttttcttcctgctcaatcaggctcagggcggcggcagccgtgtcatgaacttcggaaagagcaaagcgaagctgtatacggaagaaaagaaacgcgtgaagtttaaagatgtagccggcgcggatgaggagaagcaggagctcgttgaggttgttgagtttctgaaagatccccgcaaattcgccgagcttggcgccaggatccctaaaggcgtgctgcttgtcggacctccgggaaccggtaagacattgcttgcgagagcctcagccggtgaagctggcgttcctttcttcagcatcagcggatctgacttcgttgaaatgtttgtcggtgtcggtgcttcccgtgtgcgtgatttattcgaaaatgcgaaaaagaatgcgccttgcctgatcttcattgatgagatcgacgcggtaggacgtcagcgcggcgccggtcttggcggcgggcatgatgaacgcgaacagacgctgaaccagctgcttgttgagatggacggtttcagtgcgaatgaaggaatcattattatcgctgcgacaaaccgtgcggacattcttgaccctgcattgctccgtccgggacgttttgaccgtcagattacggtagaccgtccggatgtcatcggccgtgaagccgtattgcaggtgcatgcgagaaacaaaccgcttgatgagacggtgaacttaaaagcaatcgcttcaagaacacccggtttctcaggcgcagatttagaaaaccttcttaacgaagcggcactcgttgctgcccgtcaaaacaagaagaaaattgatatgcgcgacattgatgaagcaacggaccgtgtcattgcgggtcctgcgaagaagagccgcgtcatctcgaaaaaagaacgcaatatcgtggcgtaccacgagggcggtcacaccgttatcggacttgtgctggatgaagccgatatggttcataaagtaacgattgttccgaggggcaggcaggcggatacgcagtcatgcttccgagagaagaccgttacttccagacaaaacctgaacttctcgataaaattgtcggtcttctgggcggacgtgttgccgaggaaattatcttcggcgaagtcagcacgggggctcacaatgacttccagcgggcaacgaacattgccagaagaatggtga

SEQ ID NO: 110 - protein, 510 aa, Bacillus amyloliquefaciens
MNRVFRNTIFYLLILLVVIGVVSYFQTSNPKTENMSYSTFIKNLDEGKVDSVSVQPVRGVYEVKGQLKKYDKDQYFLTHVPEGKGADQIFDAIKKTDVKVDPAQETSGWVTFLTTIIPFVIIFILFFFLLNQAQGGGSRVMNFGKSKAKLYTEEKKRVKFKDVAGADEEKQELVEVVEFLKDPRKFAELGARIPKGVLLVGPPGTGKTLLARASAGEAGVPFFSISGSDFVEMFVGVGASRVRDLFENAKKNAPCLIFIDEIDAVGRQRGAGLGGGHDEREQTLNQLLVEMDGFSANEGIIIIAATNRADILDPALLRPGRFDRQITVDRPDVIGREAVLQVHARNKPLDETVNLKAIASRTPGFSGADLENLLNEAALVAARQNKKKIDMRDIDEATDRVIAGPAKKSRVISKKERNIVAYHEGGHTVIGLVLDEADMVHKVTIVPRGRQADTQSCFREKTVTSRQNLNFSIKLSVFWADVLPRKLSSAKSARGLTMTSSGQRTLPEEW

SEQ ID NO: 111 - DNA, 1134 bp, Bacillus amyloliquefaciens
atgggcatagcaggaacgtttctatttatgatcgtgatcggagccgcgatcggcgcggtgacgaatcatcttgccattcagatgttatttcgtccgtaccggccgtattacctgttcggaaaacgggttccgtttacgccggggctgatcccgaaaagacgggatgaattggcaaaacaaatggggctcatggtgacgaaccaccttttaaccccggaaggaataaaaaagcggcttttatcagataacgttaaaaaccaggcgcttcttttcgccgaacaattcacgcaaaaaatggccgcttccgaaatgacggtgcacgaagctttggccgccgcgggcatccggaatccgcaggaaaagacggatgcctggattgaccgttttaccgatgaaaagctttcggacctgtaccggaaatatgagcaccgcgccatcaaagactggcttcctgatgagctgcaggaaaagctggatgaaaaaatcccgctggccgcagattatatcctgaagcgtagcattgattattttgagagcgaagaagggaaagacagactcggaaatatgattgacgactttttgaattcccgggggatgctcggcggcatggtgcagatgttcctcggcaattcaagcttggcagaccgtgtgctgcctgagctgttaaagtttttgcgcaatgaggaaacgaaaaagcttctggctgatctgctttctcaagaatggggcaagctcaaatcttatacactttatgaggccgatgaaaagtggaatgcgaaagatctgctgttcagcatgaaaaagcgggctttggccgcacttcaaaccgcgccctttttcgaatgccggctcggtgacatcatctcccgttatgaaggggagattacggggacgtacgcgccgaagctgcttgatgcggcactcggcagtattgccgctcatttggaggatgtgctgaaacggctgcgtcttgaggaagtggtcaaagagcaggttgatcagtttcccgttgaacggctggaagaaatggtgctgtcgatttccaagagagaatttaagatgataacgtatttaggcggtctgctcggcgggataatcggagcaattcaggctttgtttgtcattcttttctaa

SEQ ID NO: 112 - protein, 377 aa, Bacillus amyloliquefaciens
MGIAGTFLFMIVIGAAIGAVTNHLAIQMLFRPYRPYYLFGKRVPFTPGLIPKRRDELAKQMGLMVTNHLLTPEGIKKRLLSDNVKNQALLFAEQFTQKMAASEMTVHEALAAAGIRNPQEKTDAWIDRFTDEKLSDLYRKYEHRAIKDWLPDELQEKLDEKIPLAADYILKRSIDYFESEEGKDRLGNMIDDFLNSRGMLGGMVQMFLGNSSLADRVLPELLKFLRNEETKKLLADLLSQEWGKLKSYTLYEADEKWNAKDLLFSMKKRALAALQTAPFFECRLGDIISRYEGEITGTYAPKLLDAALGSIAAHLEDVLKRLRLEEVVKEQVDQFPVERLEEMVLSISKREFKMITYLGGLLGGIIGAIQALFVILF

SEQ ID NO: 113 - DNA, 1977 bp, Bacillus amyloliquefaciens
ttgaaaaaactcataaccgaggaggacattgcgtcactcgtatccgtgacagacccgcaatatgcccctgacggcagaagagccgcttacgtccggacaacagtcaatcataagcgtgattcctattcctcagccattatggtatatgacacagaatccggcatctcaaacccgtggactttcggggacgataaaaatacaagtccgcggtggtcgcctgacggtcggcgcctcgcctttgtttctgacagggaggacggcatccctcagctgtacatcatcgacgctgccggcggagaggcggaacaggctgccgatattccttggggcgtatcagatccgatatgggcgcccgacggcagatccgtgcttgtgtccgtcagtctgacatcagcggagcgcgccgatgagaaagaaaaaaagaagcatgacgagtatgagccggttgagattcaatcattaacatataaacgtgacgggaagggcctgctgaacggaagccggacacagcttgtgctgattcatcttgaaacgggggagattcagcagctgacagatcatgaagctgatcattatggcgcggccttttcaccggatggcaggcagcttgcgtttaccgccaatttatgcgagccgggtgacgccggaaagccgagcgatgtctatctgatgaatctggcggacggaagcctgaagcagattacgccgcaccgcggttctttcggttcctgcgtgttttcaccggacggttcttatatcgcgatgctgggccatgagaatgaatttcgcaatgcgactttagagaaagcgtggctgtacgacgtgaaaactgagcggctgtcctgcctgaccgacatgctggatgttcatttgagcgatgcgctgattgcggattcaatcataggaggagtgacgccccggccggtatggacaaacgacgggcagggcttttacgttctcgggagcgagcagggaagcaccggtatttattatatctcgattgacggcctcgtatatccgatccgattagaagaagagtacgtgaacggttttgcttttcatcctgatcagaaaagctgtatcgctgtcattgccaaacccgcacagccttccgagctttacagcatttcacttgaaaatggggaagagaggcaattgacattttacaatgatcggtttatagaggagcgtatcatatccgtgccggaaaagctgcaatatgaaacaaaggacgggctgacggtaaacggctggtttttaaagccttccgtttttgaagaggatcaaacatatcccctcattctatacatacacggcgggcctcacatgatgtacggccatacgtattttcacgaattccaagtgctggccgcacaaggatatgctgtcgtgtatgtcaacccgagaggaagccacggctacggacaggattttgtcaatcgtgtcaggggtgattacggaggcggagattaccgtgatgtcatgcaggcggtggatgaagccgttcaggcgtatccgtttttagacagcggccgtctcggtgtgacgggcggaagctacggagggtttatgacgaattggattgtcggacagacaggccgttttaaagcagccgtcacgcagcgctccatttcaaattggttcagcttccacggtgtcagcgatatcggcttcttttttaccgactggcagctcggacatgatttgtttgaggaagcggataagctttgggatcgttctcctgtaaaatatgcatcccgcgtttcgacgccgcttttgatcctgcacggtgagcgagatgaccgctgtccgatagagcaggcggagcagctctttaccgcgttgaagaaactgaacaaaacgacgtcgttcatccgatttccgaaagctacgcatgagctgtcgagaagcggccatcccgaacagcggatgaaacgcatccgttatatttgttcatggtttgatgactatttgtaa

SEQ ID NO: 114 - protein, 658 aa, Bacillus amyloliquefaciens
MKKLITEEDIASLVSVTDPQYAPDGRRAAYVRTTVNHKRDSYSSAIMVYDTESGISNPWTFGDDKNTSPRWSPDGRRLAFVSDREDGIPQLYIIDAAGGEAEQAADIPWGVSDPIWAPDGRSVLVSVSLTSAERADEKEKKKHDEYEPVEIQSLTYKRDGKGLLNGSRTQLVLIHLETGEIQQLTDHEADHYGAAFSPDGRQLAFTANLCEPGDAGKPSDVYLMNLADGSLKQITPHRGSFGSCVFSPDGSYIAMLGHENEFRNATLEKAWLYDVKTERLSCLTDMLDVHLSDALIADSIIGGVTPRPVWTNDGQGFYVLGSEQGSTGIYYISIDGLVYPIRLEEEYVNGFAFHPDQKSCIAVIAKPAQPSELYSISLENGEERQLTFYNDRFIEERIISVPEKLQYETKDGLTVNGWFLKPSVFEEDQTYPLILYIHGGPHMMYGHTYFHEFQVLAAQGYAVVYVNPRGSHGYGQDFVNRVRGDYGGGDYRDVMQAVDEAVQAYPFLDSGRLGVTGGSYGGFMTNWIVGQTGRFKAAVTQRSISNWFSFHGVSDIGFFFTDWQLGHDLFEEADKLWDRSPVKYASRVSTPLLILHGERDDRCPIEQAEQLFTALKKLNKTTSFIRFPKATHELSRSGHPEQRMKRIRYICSWFDDYL

SEQ ID NO: 115 - DNA, 477 bp, Bacillus amyloliquefaciens
atgaaaacagcaggcatttacctggcagccggtacaagcagacgcatgggaacggataagcgaagtttatttctcaatggcgtttccctcggaagtatggctcttaaaaatgccttgttatctgaattagatcatatttttgttattacgagaaagggagattcactgcattggctttcggattttttctttttagatcccatgtcaaataagtggagccaggcagaatgtgagcaagcgggtaagggccaaggccattctatacaatgcggtttgcaaaaagcggcagcgtacgaggctgacgccgttatcattctccttgcagatcagccgtttgtcaccgcagatatcatcaatacgttaattgattcctatcaaaaagagcgccgttattcatttatcgccgctgaaaatcagcatcttcctatgcccccattttattctcaaatcaatgtttcccggtattgcatcagttaa

SEQ ID NO: 116 - protein, 158 aa, Bacillus amyloliquefaciens
MKTAGIYLAAGTSRRMGTDKRSLFLNGVSLGSMALKNALLSELDHIFVITRKGDSLHWLSDFFFLDPMSNKWSQAECEQAGKGQGHSIQCGLQKAAAYEADAVIILLADQPFVTADIINTLIDSYQKERRYSFIAAENQHLPMPPFYSQINVSRYCIS

SEQ ID NO: 117 - DNA, 894 bp, Bacillus amyloliquefaciens
ttgctgaaaataggttcacacgtctcaatgagcggaaaacatatgctccttgccgcaagcaaggaagctgtttcgtacggggcgaatacatttatgatctatacgggcgctccccaaaacacgcgccgcaaaaaaattgaagacttgaatatcgaagcgggccgcgcccatatgaaggaaaacggcatcgatgagattgtcgtgcatgcgccgtacatcattaacatcggaaatactacaaatccggcaacgtttgagctgggtgttgattttctgcgttctgaaattgaaagaacggcagcaatcggcgcgaaacagatcgtgcttcatccgggagcgcatgtcggagccggggctgagacgggcatcaaaaaaatcattgaaggtttaaacgaagtgattgttcccggtcaaaacgtgcagattgcgctggaaacaatggcgggcaaaggatcagaatgcggaagaagctttgaagagctggccgagatcattgcgggggttacgcataatgaacatctatccgtctgctttgacacttgccacacccatgacgccgggtatgatgtcgccaatgattttgacggtgttcttaacgagtttgataaaatcgtcggcatcgatcggataaaagtccttcatgtgaatgacagtaaaaatattaaaggcgcccggaaagaccgccatgaaaatatcgggttcggagagatcggttttgacgctctgcagtacatcgttcatcacgagcagcttgccgatattccgaaaatcctcgaaacaccgtatgtaggcgaagacaagaaaaataagaagccgccgtaccgttttgaaatcgaaatgctgaaagaaaagcagtttgatcaggagcttcttgaaaaaatatcagctcaataa

SEQ ID NO: 118 - protein, 297 aa, Bacillus amyloliquefaciens
MLKIGSHVSMSGKHMLLAASKEAVSYGANTFMIYTGAPQNTRRKKIEDLNIEAGRAHMKENGIDEIVVHAPYIINIGNTTNPATFELGVDFLRSEIERTAAIGAKQIVLHPGAHVGAGAETGIKKIIEGLNEVIVPGQNVQIALETMAGKGSECGRSFEELAEIIAGVTHNEHLSVCFDTCHTHDAGYDVANDFDGVLNEFDKIVGIDRIKVLHVNDSKNIKGARKDRHENIGFGEIGFDALQYIVHHEQLADIPKILETPYVGEDKKNKKPPYRFEIEMLKEKQFDQELLEKISAQ

SEQ ID NO: 119 - DNA, 1293 bp, Bacillus amyloliquefaciens
atgatcaggctcgactatttactgaaaaaagacggctatcttttcgctcttatgctgatcaccgtgccgctggcgggggaactgaaattttaccccctgaatgaggtatatcggatcagcttcggcgccccggcttttttcttttttcttctgctgcttcggcatgtgccggcggtattgtcagggctgttgacaggtgcagccgttgtgggattccggatcggcctggcgtgctgggggggagagcatgccggatttacggcggcttttttcagccaatatcccagtttctttttttactttacatatgcctgtttgttttatgtgctgaaggtcaggcttttttgggatcggccgctcatgatcgggtttctcggttttctcattgaaatggcgtccgatgccgttgaaatgacggttcagttttccggcggcaagcagattatgatgccggacaagctggcggatattgcggttatcgctgtttctcacacatttattgtgctgagttttttcaacgtgatgaagctgcacgaatctcaggtcagggaaaaacaaacgagaaagcagcatgagcacatgctgatgattgtgtctaacttatatgaagaaacgattcatctgaaaaaaacgctgaaaacgacggagcatgtgacgaaagaatcctatcagctgtatcgggaaatgagcgggaacgaccgggagctcgggagccgaatgctgcgccttgcgggagaaattcatgaagtgaaaaaagacaatcagcgaatattcgccggcctgtcgaagctgatttcaaatgagagattccgggattacatgaatgccgccgatctggtcggcctcgttatccgcatcaatgaaaaatacgccgaatctttaggcaaagacattcaattcaaaaacgtgattgaaggagaacaccccgattatcacgtctttaccgtcctgtcgatcttaaataacctgaccgccaatgccgtcgaagccatgggtgacaggggtgagatccgcctcgcgctgcgcagggcggagggggggatggccgaatttgaggcggaagatgacggtcccggcattccggaaaaaatcggagaggtcgtttatgatcccggttttacgtccaaatacgatgaattcggcgcaccttcaacgggcatcgggctttcatacgtgaaggaaatcgtaaccgaacttgacggagacatttcctttcataacaagccaaaaggcgtcatatttacgattaagctgccggtgaagcatttgattgcagaaaggatgaactcataa

SEQ ID NO: 120 - protein, 430 aa, Bacillus amyloliquefaciens
MIRLDYLLKKDGYLFALMLITVPLAGELKFYPLNEVYRISFGAPAFFFFLLLLRHVPAVLSGLLTGAAVVGFRIGLACWGGEHAGFTAAFFSQYPSFFFYFTYACLFYVLKVRLFWDRPLMIGFLGFLIEMASDAVEMTVQFSGGKQIMMPDKLADIAVIAVSHTFIVLSFFNVMKLHESQVREKQTRKQHEHMLMIVSNLYEETIHLKKTLKTTEHVTKESYQLYREMSGNDRELGSRMLRLAGEIHEVKKDNQRIFAGLSKLISNERFRDYMNAADLVGLVIRINEKYAESLGKDIQFKNVIEGEHPDYHVFTVLSILNNLTANAVEAMGDRGEIRLALRRAEGGMAEFEAEDDGPGIPEKIGEVVYDPGFTSKYDEFGAPSTGIGLSYVKEIVTELDGDISFHNKPKGVIFTIKLPVKHLIAERMNS

SEQ ID NO: 121 - DNA, 1377 bp, Bacillus amyloliquefaciens
atgggcacaaatgtacaggcggattctttgtctgccgattgtacaaaaacaatgaacggggctctgatgctgattgaatcattaaagaaagaaaatgtcgagatgatcttcggctatccggggggagccgtccttccgatttacgataaactgtatcaatcaggattggttcacatcctgccccgccacgagcaaggcgcgattcatgcggcagaagggtatgcgagagtctccggaaagccgggggttgtgattgctacctccggacccggagcgacaaatttagttaccggtcttgcggatgcgatgattgattcactgccgctcgtagtgtttaccggtcaggtcgccacttcggtcatcggcagcgacgctttccaggaagccgacattttaggaattacgatgccgattacgaaacacagctaccaagtccgccgtccggaagatctcccccgtgtgattaaagaggcgttccatattgccacgacgggaagaccgggcccggtattaattgatataccgaaggatgtcgcagcatttgaaggagaattcagatatgatcacgagatcaatcttccgggttatcagccggtaaaagagcctaactatctgcagatccgaaagctcgtggaagctgtcagcagtgcgaaaaagccggttattttagccggagcgggtgttttgcacggtaaagcttcagaagatttaaaaaattatgccgaacagcagcaaattccggtagcgcacacgcttctcggtctgggcggtttcccggcagaccatcctctttttctgggaatggcggggatgcacggcacatacacagcgaatatggcgctttaccactgtgacttgctgatcagcatcggagcgcggttcgatgatcgcgtgaccggaaatctgaagcattttgcaaaatcggccaaagtagcgcatatcgatattgatcctgctgaaatcggaaaaattatcgaaacgcagattccggtggtcggcgacagtaaaatcgtccttcaggaattattgaagcaaaacggaaaacagggacagacagaggaatggaaacagcagctttcagaatggaaagaagaatatccgctttggtatacagacgacagagaagagggcttgaaaccccaaaagctgattgagtatattcaccaattcacaaacggtgaggcgattgtggcgacggatgtcggccagcaccagatgtgggcggctcagttttatcctttccgaaaggctgataagtgggtgacctcggggggctcggcacaatgggcttcggccttccggcggccatcggagcgcagctggccgatcgtaacgccacggtcgttgccatcctcggagacggcggttttcagatga

SEQ ID NO: 122 - protein, 458 aa, Bacillus amyloliquefaciens
MGTNVQADSLSADCTKTMNGALMLIESLKKENVEMIFGYPGGAVLPIYDKLYQSGLVHILPRHEQGAIHAAEGYARVSGKPGVVIATSGPGATNLVTGLADAMIDSLPLVVFTGQVATSVIGSDAFQEADILGITMPITKHSYQVRRPEDLPRVIKEAFHIATTGRPGPVLIDIPKDVAAFEGEFRYDHEINLPGYQPVKEPNYLQIRKLVEAVSSAKKPVILAGAGVLHGKASEDLKNYAEQQQIPVAHTLLGLGGFPADHPLFLGMAGMHGTYTANMALYHCDLLISIGARFDDRVTGNLKHFAKSAKVAHIDIDPAEIGKIIETQIPVVGDSKIVLQELLKQNGKQGQTEEWKQQLSEWKEEYPLWYTDDREEGLKPQKLIEYIHQFTNGEAIVATDVGQHQMWAAQFYPFRKADKWVTSGGSAQWASAFRRPSERSWPIVTPRSLPSSETAVFR

SEQ ID NO: 123 - DNA, 519 bp, Bacillus amyloliquefaciens
atgaaaacaaaagaattagtcattatggccctgtttgcggcaatcggagcggtgcttcattccattatgccgccggtattattcggaatgaaacccgatatgatgcttgtgatgatgtttatgggtattctgttatttccccgtgtgcagaacgtgctgatgatcgggattgtaacgggaatcatttccgcactcacgacatcttttccgggcggacagcttccgaatatcattgaaaaaccggtaacggcgtttctgtttctcgcgctggcgcttttggtgaaaaagagcgtgaaaacagcggccgccgccgtcattacaatagccggcaccttcatctccggtttgctctttctggcgctggcccttctgattgtcggcctgccggggggattcaccgccttggtgctcgcggtcgtccttccggcggctgcgctgaatgcgatcgccattatcattatgcatccgattgtgcagacgatcttaaaacggtccaatatgattgaaacggtgaaataa

SEQ ID NO: 124 - protein, 172 aa, Bacillus amyloliquefaciens
MKTKELVIMALFAAIGAVLHSIMPPVLFGMKPDMMLVMMFMGILLFPRVQNVLMIGIVTGIISALTTSFPGGQLPNIIEKPVTAFLFLALALLVKKSVKTAAAAVITIAGTFISGLLFLALALLIVGLPGGFTALVLAVVLPAAALNAIAIIIMHPIVQTILKRSNMIETVK

SEQ ID NO: 125 - DNA, 849 bp, Bacillus amyloliquefaciens
atgaacgaaaaaaaagagaaaatcataaaaacaggcatccatttatttgccaaaaaagggttttcttcaacaaccattcaggaaatcgccggtgaatgcggaatttcaaaaggggccttctatcttcattttaaatcaaaagaagaccttttgctctcagcatgtgagtattacatcggcatgtctatggaagaaataaagaaaatcaaaacagaacatcagcataaatcgcctaaggacgtattccgaaaacaaatcgcttatcaattccaggaatttatggagcacaaggactttatcattctcttgctgagcgaaaaggtcattcctgaaaatcaaaaggtcaaacagtattttcatgaggccaatattcaatttaacatactgtaccgggatgctttgctctccgtttacagagatgccgtcataccgtttatagcggatgcgtccgttatggcgcaaggaatagtgagctcctatattcatttcttgatttttaatgaacatacggcattccggacggaaaacgtggcggcctttctgattgccagaatcgatgacctgattacgggactgataagagacaatcccgatccgctgctgccgcaggatatcttcactcagccggcggcggacagagaaagactgcttgcggatattcaaaagataaaagcacagcaggggctgcctgaggacgtcctcgtatcgcttgaagtcattgaagaggaatacgcaaaggaagagccgcgaaaaccgattattaaaggaatgctgtccaacttggcaggcagcggaaatgagcagattgaaacgctgcgggcttccattgaaacctatttcagcttataa

SEQ ID NO: 126 - protein, 282 aa, Bacillus amyloliquefaciens
MNEKKEKIIKTGIHLFAKKGFSSTTIQEIAGECGISKGAFYLHFKSKEDLLLSACEYYIGMSMEEIKKIKTEHQHKSPKDVFRKQIAYQFQEFMEHKDFIILLLSEKVIPENQKVKQYFHEANIQFNILYRDALLSVYRDAVIPFIADASVMAQGIVSSYIHFLIFNEHTAFRTENVAAFLIARIDDLITGLIRDNPDPLLPQDIFTQPAADRERLLADIQKIKAQQGLPEDVLVSLEVIEEEYAKEEPRKPIIKGMLSNLAGSGNEQIETLRASIETYFSL

SEQ ID NO: 127 - DNA, 534 bp, Bacillus amyloliquefaciens
atgacaccatttacgattacggaggagaaggcgggggcattccgggtcacctccgcccggaaggatgatgaagaagaagtcatggatctgctcgtgcaggcggcagaatggcttcgcgataaagggtcgaaccagtggagcggccttctgcaaggggaagatacccacaatatgcgggaggcgatcgccaaagggtatgtttttttattcaggcagaatgaagagctggccggcgtcgtcatgctgcttcccgaagcaagcgggtgggacagacgtctatggggcgatgaaggacatgaggagtccgtatatctccaccggctggcgattaacaggcggtttgcaggggcggggctcggccggacgatcatgacttgggcggagacgggggtgtcttgtcctggaaaaacgaaaatccggctcgactgcgtgtccggaaacaaggcgcttcagtcgttttacagcggaatgggttacgaatcaaaaggactcgcgccgggttatcatttgtttgaaaaaaaggtgagcaaataa

SEQ ID NO: 128 - protein, 177 aa, Bacillus amyloliquefaciens
MTPFTITEEKAGAFRVTSARKDDEEEVMDLLVQAAEWLRDKGSNQWSGLLQGEDTHNMREAIAKGYVFLFRQNEELAGVVMLLPEASGWDRRLWGDEGHEESVYLHRLAINRRFAGAGLGRTIMTWAETGVSCPGKTKIRLDCVSGNKALQSFYSGMGYESKGLAPGYHLFEKKVSK

SEQ ID NO: 129 - DNA, 1122 bp, Bacillus amyloliquefaciens
atgattgcccttcatttcggagcgggaaacatcgggcggggctttatcggcgccctgctccatcattccggctatgacgtagttttcgctgatgtgaatgaaacgatggtcagccttctcaatgaaaagaaggaatataccgtggagcttgccgacggcggcaggcagacagaaatcatcggccccgtttcagccatcaacagcgcggtgcaagaacaagagctgtacgggctgatcaatgaagcggcgatcattacgacggcggtgggcccgaacgttctcagactcatcgccccgtccatcgcggaaggtctgaagcgcagaacgtcctctgagcctctcaatatcattgcctgtgaaaatatgatcggcggcagcagttttctgaaaaaagaagttttcggacatttgacggaagcggagcgggaactcgtgaaccggacagtcggcttcccggattctgcggtagatcggatcgtgccgattcagcaccatgaagatccgctgaaagtatccgtagaaccgttttttgaatgggtcatagacagaaccggctttgccggcgatcagccggtacttaaaggcgcgttgtttacggatgatcttacgcctttcattgagagaaagctgtttaccgtcaataccgggcatgccgtcacggcgtatgtcggctatcagcgcggattaaaaaccgtcaaagaggccatcggccatccggaaatccggcgtgtcgtgtacgatgcactttcagaaacgggcgagtacttggtgaaagcgtacggctttaagcaagccgaacacgagcagtacatgaaaaaaatcatcagccgctttgataatgaatacatcacggatgatgtgacaagagtcgccagatcaccgctcagaaaactcggagcgaatgacagattagtagggccggccaaaaaaataaaagaaccgaatgcgctggcggaaggtatcgccgccgccctgcgctttgactatcaggatgatccggaagcggttgagctgcaaaagcttatcgcggaaaaaggcacgagcggcgttcttcaagacatttgcggtattcagccgcatgaaccgctgcacggcatcgtgctcaaaaagctcaatcaataa

SEQ ID NO: 130 - protein, 373 aa, Bacillus amyloliquefaciens
MIALHFGAGNIGRGFIGALLHHSGYDVVFADVNETMVSLLNEKKEYTVELADGGRQTEIIGPVSAINSAVQEQELYGLINEAAIITTAVGPNVLRLIAPSIAEGLKRRTSSEPLNIIACENMIGGSSFLKKEVFGHLTEAERELVNRTVGFPDSAVDRIVPIQHHEDPLKVSVEPFFEWVIDRTGFAGDQPVLKGALFTDDLTPFIERKLFTVNTGHAVTAYVGYQRGLKTVKEAIGHPEIRRVVYDALSETGEYLVKAYGFKQAEHEQYMKKIISRFDNEYITDDVTRVARSPLRKLGANDRLVGPAKKIKEPNALAEGIAAALRFDYQDDPEAVELQKLIAEKGTSGVLQDICGIQPHEPLHGIVLKKLNQ

SEQ ID NO: 131 - DNA, 102 bp, Bacillus amyloliquefaciens
atgtacctgtttttttattccataaaaaatctcagaatcgaaataaaatcattgactttatataaaaaagaaagtaacatactatttgtaagtaaatattaa

SEQ ID NO: 132 - protein, 33 aa, Bacillus amyloliquefaciens
MYLFFYSIKNLRIEIKSLTLYKKESNILFVSKY

SEQ ID NO: 133 - DNA, 1062 bp, Bacillus amyloliquefaciens
gtgtcacagcctaatatgcccaatatcacccctgtcgttacactttccagagacgataccattaaccttcttctttcgtcaattgctatggaagagctgggaatggcacatattctgaatgcggaaggggaaaaaatccaatacgcgctcggaacgattcccggattaacaggacccccgtcaagtcttgcggatattcttaacctgaatgagagcgtccgggatacgcttgacagcttaatgaaacaggagctccttctcggttcaaaattggacagtatctcaaatatccctacattggcgggaccgacgggggccacggggccgacgggggccacgggtgcgggtcttcaagggattgttgcttttaatccgctgatcgcccctacttacacgaccggacaggttgtcttgtataacggcagctcttatgtcgcaaacgtaaacagcccgtcgggaacccctgaaacctcagctgactatacacttttagctgcggcgggaagcaccggcgctactggttcaaccgggcggaccggaattaccggggctactggcggcactggatcaactggaattaccggcgttacaggaccgaccggagttaccggggctaccggcattacagggcctccgggaagcaccggaacaagtctgacagccacttccggctatgcgagcaatacgggcggcggtgttgtcgcagttattaacggcggcacggccatttccttaccgaatgaacaaaacctctcagcggatattaccgctaatgccgcaaatactgtattcaccgttgctccggcaggacggtactatatttcctaccatattaatttaacggccggcctgctagtaagttcgcgcatcttaatcaacggcactccggctgcaagttcgattattgctccggtcgcgtctttggcaaacttcaataactcctttattgtgactttgacagcaggcagcaccattcagctccagctgttcggattattgggtgcggccacattgcttagaggaagtgccggcgcagctttaaacattattcgattatcttaa

SEQ ID NO: 134 - protein, 353 aa, Bacillus amyloliquefaciens
MSQPNMPNITPVVTLSRDDTINLLLSSIAMEELGMAHILNAEGEKIQYALGTIPGLTGPPSSLADILNLNESVRDTLDSLMKQELLLGSKLDSISNIPTLAGPTGATGPTGATGAGLQGIVAFNPLIAPTYTTGQVVLYNGSSYVANVNSPSGTPETSADYTLLAAAGSTGATGSTGRTGITGATGGTGSTGITGVTGPTGVTGATGITGPPGSTGTSLTATSGYASNTGGGVVAVINGGTAISLPNEQNLSADITANAANTVFTVAPAGRYYISYHINLTAGLLVSSRILINGTPAASSIIAPVASLANFNNSFIVTLTAGSTIQLQLFGLLGAATLLRGSAGAALNIIRLS

SEQ ID NO: 135 - DNA, 282 bp, Bacillus amyloliquefaciens
atgcattacataacggcatgcttaaaaatcatcagtgataaagaccttaatgaaataatgaaggaattcaaaaaacttgaggaagaaacgaacaaagaagaaggctgtattcagttccatgctcatccgcttgaaccatcagaacgcaaaattatgctttgggagatttgggaaaacgaagaagctgttaaagtccattttacgaaaaagcacacaaaagacgttcaaaaacaagaattaacggaagtagaatggttaatgaaaagcaatgtgaatgagtaa

SEQ ID NO: 136 - protein, 93 aa, Bacillus amyloliquefaciens
MHYITACLKIISDKDLNEIMKEFKKLEEETNKEEGCIQFHAHPLEPSERKIMLWEIWENEEAVKVHFTKKHTKDVQKQELTEVEWLMKSNVNE

SEQ ID NO: 137 - DNA, 2403 bp, Bacillus amyloliquefaciens
atgaatgactgtgtcaaaacattcggagaacttccggccgaactttattcctttgcgggaggaaaaggaagcattctctctaaaatgtatcaaagcgggtatcctgtgcctgaagggtttgtgattttgccgtcagcctttcaggacggacagctccgccatcaggcgagagaggctgttgatcaatatgtgaattccatccgcagccgccatgcatctgcgttgtttgccgtacgctcatccgcgctgagcgaggattccgctcaggcttcctttgccggagaattcgatacggtgttgaatgtcagaacagatcaagacatgtccagggcgattgatgaagtccgccggtcggtacagtcagaaagagtaaaagcgtacagcgccgttcagggaatggaagatgagcatgaaatcgcaatcgtcatccagctgatgataccgtctgagatatccggagtgctgtttaccgcagatccgattacggggagcaggcgggagatgacaggcaattacgtctacggtctcggggagcagctcgtttccggggaagccgatgcctattcttttaaactggcacggcccaagaaaaaatatgacggccccggggaatttcgcaaatatgcgtcaaagctctataaactggcgaaaaagctggaaaaagatcttggagggccgcaggatattgaatgggccgccgcgggcgggacattgtatattcttcaatcccgcccgattacgaccttacaagccggaaatctggaaacctatgaatggaacgattctttcagcggtgattttttatggacaaacacaaatataggagaagcgattcccgatgtgatgacgccgctgacatggtcgctcctccggaatctggatgaagagtcgggcatcattccgggctattatgtctggtccggcaatatttgcggcagagcctataacaatatgagccagcctctttccgttctcgccgctttcggtctgaatccgaaaggcggaaaaattggaaaaatgatgagcgatacattgggagaaatcccggcggaaatgaagatacctttatatccgttctcaaagtatgaattattgaagatcatcccgaaaaaactgaaaccgtatctgtcgaaaatgaagcaagcgaaaaaaaacatgtcctcctacttggacgaatcaccggagtggtgccggaatattgaggaaaagctgaaacgcgccgaaacggagcaggcattattagcgatatggaacgatgagatctatccgtatttatgcaacgcgtggtttgcgttaatatccggcgggcgtgattctgcgcaatcctcttcgtcgttaacctctcaattaacaaaactcgcaggcatagaagatgcgaatctcctgctttccaatctgaggggaaaaggcggactggccagcctggagccgattatcggcattgatcaagtcatgaaaggccgtatgagcgaggaagaatatctcaggaaccagggccaccgtggcccgcatgaatacgaactttccataccgcatccgggagaaaaccgggattggctgacgaagcagatcaaagaacacaaggagtcgggtattgatgccgaacaactgcttttgaaacagcagcgggcgcatgaacaggccttccgaagatttgaaaaaaagtttcctcataaggtcaaatggctcaaagccaaaatggaaaaagcgtcagaatacgcgaatattagagaaacaaccagatccgaatttgtcagagtgtaccggacagccagagcattcgcgctcagagcggcggaaatgaccggcatgaaggacgatattttcttcctgtatctgcatgaaataaccgatctgctcgcggggaaagagccggcggttgcgtcgattcaagcgagaaagcaaaactatgaaacctataaaaaactgccgccgtttccatccgttattaacggaagattcaatccgtttaaatgggctgaggatcctgacagaagagcggattattacgatgcttttatgcctgcggaaacggatgatgcgcatactttaaaaggtttcgcgggagcggccgggagagtggagggcattgtccgtgtccttgatgctccggaagacggtgattcttttgcggcgggggaaattttagtgacgtcgacaaccaatgtaggctggaccccgctttttccaagagcggctgccatcataacggacgtcggcgcccctttgtcccacgcggcgatcgtcgcccgggaactggggattcctgccgttgtcgggtgcggaaatgcaacgtcaaaactgaaaacggggacagggtggccgttgacggcgggcaaggcatcgtccagctggaaccgcggcagactccggtcacttctgaagaggaaaatggtaaactga

SEQ ID NO: 138 - protein, 800 aa, Bacillus amyloliquefaciens
MNDCVKTFGELPAELYSFAGGKGSILSKMYQSGYPVPEGFVILPSAFQDGQLRHQAREAVDQYVNSIRSRHASALFAVRSSALSEDSAQASFAGEFDTVLNVRTDQDMSRAIDEVRRSVQSERVKAYSAVQGMEDEHEIAIVIQLMIPSEISGVLFTADPITGSRREMTGNYVYGLGEQLVSGEADAYSFKLARPKKKYDGPGEFRKYASKLYKLAKKLEKDLGGPQDIEWAAAGGTLYILQSRPITTLQAGNLETYEWNDSFSGDFLWTNTNIGEAIPDVMTPLTWSLLRNLDEESGIIPGYYVWSGNICGRAYNNMSQPLSVLAAFGLNPKGGKIGKMMSDTLGEIPAEMKIPLYPFSKYELLKIIPKKLKPYLSKMKQAKKNMSSYLDESPEWCRNIEEKLKRAETEQALLAIWNDEIYPYLCNAWFALISGGRDSAQSSSSLTSQLTKLAGIEDANLLLSNLRGKGGLASLEPIIGIDQVMKGRMSEEEYLRNQGHRGPHEYELSIPHPGENRDWLTKQIKEHKESGIDAEQLLLKQQRAHEQAFRRFEKKFPHKVKWLKAKMEKASEYANIRETTRSEFVRVYRTARAFALRAAEMTGMKDDIFFLYLHEITDLLAGKEPAVASIQARKQNYETYKKLPPFPSVINGRFNPFKWAEDPDRRADYYDAFMPAETDDAHTLKGFAGAAGRVEGIVRVLDAPEDGDSFAAGEILVTSTTNVGWTPLFPRAAAIITDVGAPLSHAAIVARELGIPAVVGCGNATSKLKTGTGWPLTAGKASSSWNRGRLRSLLKRKMVN

SEQ ID NO: 139 - DNA, 1563 bp, Bacillus amyloliquefaciens
atgtctaagcaaggaaacttccagaaaactatgtcactttttgatcttattttaatcggcatgggagccatattcggttcggcatggctgtttgccgtcagtaacgtcgcctctaaagcgggcccgtcaggcgttttttcctggctgatcggcgggggaatcatcttattgatcggcttggtttatgcggaactgggcgccgcgctgccgcggaccgggggaattatccggtatcccgtatattcacacggacacctggtcggatatttaatttcctttgtcaccattgtggcatacacgagtcttatttctatagaagtaacggcggtccgccaatacgtggcgtattggtttcccggtttgaccgtaaaaggctctgattctccgacaattgccggatggatattgcaatttgcgctgctctgcctgttcttcctcctcaattactggagtgtcaaaacctttgcgaaagcaaacttcattatttcgatttttaaatatgtcgtaccgattacggtaattgttgtactgatttttcattttcacccgggcaatatgaccgttcacggattcgcgccttttggtttcaccggaattcaggccgcgatttccacaggcggcgtcatgtttgcataccttgggctgcatccgattgtggctgtcgcgagtgaagtgcagaatccgaagcggaacattccgattgcattgattgtttgtattatcgtttctactattatttataccgtgctgcagctcacttttatcggggcgatcccgggggataccctgaagcacggatggccggctatcgggactgaattctcccttccgttcaaagatatcgccgtcttgctcggtttggggtggctggcgacattggtcattttagatgcgattttatcaccgggcggtaacggaaatatctttatgaatacgacttcacgtctcgtctatgcctgggccagaaacggaacattattcagcattttttctaaagtcaataaagaaaccgggacaccgcgtgcctccctttggctttcgttcggtctggctgttttttggacgcttccgttcccttcttggaacgctcttgttaacgtatgctccgtcgcattgattctgtcttatgcgattgcgccgatttcttctgcggcgctgagagtcaacgcaaagaacattaacagaccgttttatttaaaagggatgagcatcatcgggccgctgtcgtttatttttacctcttatattgtatattggtccggatggcgcaccgtatcctggcttctcggttctcaaattgtcatgtttctgatctatctctgtttcagtaaatatgctcccaaagatgatgtcagcatacgccagcagctgaaatcagcatggtggatcgtcggcttttatgtcatgatgctgattttctcctatctcggctcgttcggccacggattgggcattatcagcaatccgcttgacctgattctgatcgccatcggttcgctcggtatttattactgggcaaaatatacaggtctgccgaaggctatgatcgacagtgataaatga

SEQ ID NO: 140 - protein, 520 aa, Bacillus amyloliquefaciens
MSKQGNFQKTMSLFDLILIGMGAIFGSAWLFAVSNVASKAGPSGVFSWLIGGGIILLIGLVYAELGAALPRTGGIIRYPVYSHGHLVGYLISFVTIVAYTSLISIEVTAVRQYVAYWFPGLTVKGSDSPTIAGWILQFALLCLFFLLNYWSVKTFAKANFIISIFKYVVPITVIVVLIFHFHPGNMTVHGFAPFGFTGIQAAISTGGVMFAYLGLHPIVAVASEVQNPKRNIPIALIVCIIVSTIIYTVLQLTFIGAIPGDTLKHGWPAIGTEFSLPFKDIAVLLGLGWLATLVILDAILSPGGNGNIFMNTTSRLVYAWARNGTLFSIFSKVNKETGTPRASLWLSFGLAVFWTLPFPSWNALVNVCSVALILSYAIAPISSAALRVNAKNINRPFYLKGMSIIGPLSFIFTSYIVYWSGWRTVSWLLGSQIVMFLIYLCFSKYAPKDDVSIRQQLKSAWWIVGFYVMMLIFSYLGSFGHGLGIISNPLDLILIAIGSLGIYYWAKYTGLPKAMIDSDK

SEQ ID NO: 141 - DNA, 378 bp, Bacillus amyloliquefaciens
atgagaagtttttttgtcacaggaacagataccggcgtcggaaaaaccatcgtttcttgcggacttgccgcggcattcaggcagaaacaggcggatatcggagtgtttaaaccgtttttaagcggcgtgccgcggactcatccggaaagtgacacctcgctgttgaaaaacatgtcacaaaccgcactgtctcatgaagaaatcacgccatttgaatggaaagagccgcttgcgccgtacacggccgccatgcttgaggggaaatccgtgagcatggatgaagtcatggcccactggagtaagatcaaaaatcgtcatgagtgtttcatcgtcgaggggcaggcggcatttccgttccgcttggtgaaaattacttag

SEQ ID NO: 142 - protein, 125 aa, Bacillus amyloliquefaciens
MRSFFVTGTDTGVGKTIVSCGLAAAFRQKQADIGVFKPFLSGVPRTHPESDTSLLKNMSQTALSHEEITPFEWKEPLAPYTAAMLEGKSVSMDEVMAHWSKIKNRHECFIVEGQAAFPFRLVKIT

SEQ ID NO: 143 - DNA, 1449 bp, Bacillus amyloliquefaciens
atgagcgctccagaagaaaaaaagatgagaaagcttcctaagtacatacaaatcattcaatttataaaagagaaaataggaaatggagaatggccgatcggaagtaagattccaagccagcgcacgcttgccaaacactttgaggtgaacaggagcacagtcattacagctttagaggaattgacggcggatggattaatcgaaggcagaatgggcaaagggacagttgttacgaacaatacatggacacttttggctaagaattccgctcccgattgggatcagtatgtaacctccggaattcagcagccaagccaaaaaatcgttcaagagatcaataaatcagaatcaaattctgatcttatacagctcagtaaaggagaactttcacatgagatttttcctttagctgttatgaaagagatcatgggaaaggtatcccaaaacatagaggcattcggatatgaggaaccaaaaggatatttgcctttgagagaggcattaagcggctatttaagaacaatcggcattcaagcttctccttcttccattcttattgtttcgggcgcactgcaagccttacagcttatatcaatggggcttttacaaaggggatcgaccgtttatcttgatcagccttcctatctttattcattacacgtatttcaatcagccggtatgaagctgactggagttcctatggatcatgatggacttttgccggaacatatccgcatggcaaggggagaacgggggagggctatcttatatacaaatccttgttttcataatccgacaggtattttaatgtcaaaaaagagacgagaagaaatccttgcggcaagtgagaatacacagcttcccattattgaagatgacatttatcgtgagttatggatagatgagattcccccggatcctattaaaacaatagataaaaatgggcatgtgctttacataggcagtttatcgaaaacattaagtccgggcttgaggattggctggattgtcgggccggaaccagtgattgaacgtttatccgacataaaaatgcaaacagattacggctccagttcgttatcccagagagtagcggcagagtggtttatatccggtgaataccagcagcatctagaacaggtgagaagtcaattaaaggtgagaagagaattggccttgagtgttttagaaactcatttgaaagatgtggcgacatggaatatcccaaagggaggattctttgtctgggtaaaaatattgccttccatatccgtgaaattactttataccaaagccttatcaaaagggattctgctcaatctcggcaggatctatgctgaggaaaaagggagttatattcgcttatcatatgcttatgcatctcttgaagaccttcaaaagggaatttatgaattgggtttgatgattaaggaattggcaagcagataa

SEQ ID NO: 144 - protein, 482 aa, Bacillus amyloliquefaciens
MSAPEEKKMRKLPKYIQIIQFIKEKIGNGEWPIGSKIPSQRTLAKHFEVNRSTVITALEELTADGLIEGRMGKGTVVTNNTWTLLAKNSAPDWDQYVTSGIQQPSQKIVQEINKSESNSDLIQLSKGELSHEIFPLAVMKEIMGKVSQNIEAFGYEEPKGYLPLREALSGYLRTIGIQASPSSILIVSGALQALQLISMGLLQRGSTVYLDQPSYLYSLHVFQSAGMKLTGVPMDHDGLLPEHIRMARGERGRAILYTNPCFHNPTGILMSKKRREEILAASENTQLPIIEDDIYRELWIDEIPPDPIKTIDKNGHVLYIGSLSKTLSPGLRIGWIVGPEPVIERLSDIKMQTDYGSSSLSQRVAAEWFISGEYQQHLEQVRSQLKVRRELALSVLETHLKDVATWNIPKGGFFVWVKILPSISVKLLYTKALSKGILLNLGRIYAEEKGSYIRLSYAYASLEDLQKGIYELGLMIKELASR

SEQ ID NO: 145 - DNA, 276 bp, Bacillus amyloliquefaciens
atgaacagacaagaattgattgcagaagcattaaaagcacgggacacagcgtatgtgccgtattcaaatttcagagtgggagccgctcttcttaccaaagacggaaaagtgtacagaggctgcaacattgaaaatgcggcatacagcatgtgcaactgtgctgaacgcacggcgatattcaaagctgtttccgaggggatacggaatttgcgatgctcgccgtggctgcggatactccgggaccggtttcgccgtgcggagcctgcagacaagtaa

SEQ ID NO: 146 - protein, 91 aa, Bacillus amyloliquefaciens
MNRQELIAEALKARDTAYVPYSNFRVGAALLTKDGKVYRGCNIENAAYSMCNCAERTAIFKAVSEGIRNLRCSPWLRILRDRFRRAEPADK

SEQ ID NO: 147 - DNA, 219 bp, Bacillus amyloliquefaciens
atggaaaaacaaaccctcagccatccgattggagagtatcagccggctgaatcgatttcggccggacagaaacaagaatggatcaatgcgctggaacacgctccggctaaactgaaccaagctgtcagagcgatgtcggccagtcagcttgatacgccgtaccgcgaaggggatggactgtccgccaagtggttcaccatctggcggacagccacatga

SEQ ID NO: 148 - protein, 72 aa, Bacillus amyloliquefaciens
MEKQTLSHPIGEYQPAESISAGQKQEWINALEHAPAKLNQAVRAMSASQLDTPYREGDGLSAKWFTIWRTAT

SEQ ID NO: 149 - DNA, 684 bp, Bacillus amyloliquefaciens
atgcttttccggcagcattttaaacctgtcgatattcacggtcatctgccgtacagccttaatttcggcaaaaacgataagacattttccgattataaccgggagcggtcggaaagaatgaatctcacttgggattttcctgatccgcatgatgttgatggcgatgacggcgaaatcgctttgatgacaagatgggagaaagaattagataagtacggcattgacgtgctgaattttttaacagcagagagcaatgaccggatggcggcgtttattcaagccaatcccgcgaggtttaccggatttgcatatcatcctttggaacaaaaggatgcgtatgaggagctgaaaagagcggttgaagagctcggtctgaaaggatataaactgttcgggccgctgacagacatcgagtttcatgatccgtcgctgaaaaagctgtggacgtatctggctgacaaaagactgcctgtattaattcacttcggacttttagggagagcgggggcattgtcagccatcgcaacatcaacccgctctccatctatcgcgtcgcgagagagtatgctgatataccgttcatcattccgcatttcggcgccggatattatcaggaactgctgcagctgtgctggagctgcccgaatgtgtatattgacacgtccggctcaaatcagtggatga

SEQ ID NO: 150 - protein, 227 aa, Bacillus amyloliquefaciens
MLFRQHFKPVDIHGHLPYSLNFGKNDKTFSDYNRERSERMNLTWDFPDPHDVDGDDGEIALMTRWEKELDKYGIDVLNFLTAESNDRMAAFIQANPARFTGFAYHPLEQKDAYEELKRAVEELGLKGYKLFGPLTDIEFHDPSLKKLWTYLADKRLPVLIHFGLLGRAGALSAIATSTRSPSIASRESMLIYRSSFRISAPDIIRNCCSCAGAARMCILTRPAQISG

SEQ ID NO: 151 - DNA, 351 bp, Bacillus amyloliquefaciens
gtgaaacatcataaaacgtaccattcttcatcaattcagacagcagccggccctctattggtagaagggcccgttcctccaaaggacctagcacagtatgagtttcatgaaggcctgacagcctttcgccttcctcatgaacagcacaaagcgttaatcgagatcgccgggcttcctgaaggtcggatcattatcgccagggacggacagacgattatcggctatgtgacgtatttatatcctgatccgcttgaacggtggtctgacggcaatatggaagatctccttgagctcggggcgatcgaggtcgctcccggctacagggctgttctgtcggaaaaacgttgctga

SEQ ID NO: 152 - protein, 116 aa, Bacillus amyloliquefaciens
MKHHKTYHSSSIQTAAGPLLVEGPVPPKDLAQYEFHEGLTAFRLPHEQHKALIEIAGLPEGRIIIARDGQTIIGYVTYLYPDPLERWSDGNMEDLLELGAIEVAPGYRAVLSEKRC

SEQ ID NO: 153 - DNA, 1188 bp, Bacillus amyloliquefaciens
atgaaacatgaacatgcagccgttgtactagatttcagtgcaaacgggattgggatcattcgcagcctggcccgaagaggaatcgatgtttacgcatttgacacggagggaccttatcgtatcggaaaatcaagattggcagattgcgggatatgtcccagccctttaacacaagaggaagaactgctgacattcctgactgatttcgggaagcgattccaagcaaagccggttctgtatgcaggttctgatgattatgcgggatttatatctaaattccgcgagacattagccggtttttttttatttttgctcccgagccgctctctgttagaaacggtcttagataaaagcaaagcatatgaattagcggtcaagcataacatcccctgcccgaaaaccttttttccgaacaaccgggatgagctggaagaggccatcgccaatattgacttcccgtgtattttaaaaccggtggccggccatgaatacagaaaaaaagtaaacaaaaaagcaattgtaatgaaggatgccgcacaattgcgcaaggagttcagctcctacagagaaaatggagaactgctcgtgcaggagatcatccccggagacaaccagtgtttttataaagtcgccactttttatgatgaccaaatgaaattaatgggcttattctctctgcaaaagaaccatcaattccctgctgattttggcgcgggggcccacgtcgtcagcaaacggcttcctgatttaatcgagaagaccctgccgttttttgaagcgattcagctgaagggagtaggcatggcagaatttaaaaaggacccccgggacaatgtttataagtttatcgaaattaatccgcgcttttggctcagccatagcctgacagaaccggcaggcattcatttcgtttacatgtactatctgtatttgaccggacaacatgtgaagccccagctcgaacaaaaagacggaatcaactggatttatgaggtgcgttacttcttaacgtttttgaagaaacgaaaaagaggagaaatgacgttccgggatttttggaaaggatttaaaggaaaaaaagagtacgctctgtttgcttggaatgacccgatgccatttatcagaaacacttggtctcatctcaaaaacagctggaaacggaagcggaaggaagatcggcatgtatga

SEQ ID NO: 154 - protein, 395 aa, Bacillus amyloliquefaciens
MKHEHAAVVLDFSANGIGIIRSLARRGIDVYAFDTEGPYRIGKSRLADCGICPSPLTQEEELLTFLTDFGKRFQAKPVLYAGSDDYAGFISKFRETLAGFFLFLLPSRSLLETVLDKSKAYELAVKHNIPCPKTFFPNNRDELEEAIANIDFPCILKPVAGHEYRKKVNKKAIVMKDAAQLRKEFSSYRENGELLVQEIIPGDNQCFYKVATFYDDQMKLMGLFSLQKNHQFPADFGAGAHVVSKRLPDLIEKTLPFFEAIQLKGVGMAEFKKDPRDNVYKFIEINPRFWLSHSLTEPAGIHFVYMYYLYLTGQHVKPQLEQKDGINWIYEVRYFLTFLKKRKRGEMTFRDFWKGFKGKKEYALFAWNDPMPFIRNTWSHLKNSWKRKRKEDRHV

SEQ ID NO: 155 - DNA, 624 bp, Bacillus amyloliquefaciens
atgatgaacgacgctttaacgagtttggcatgtagtctggcaccggggacggcaattcagggcaaatggaacggcaaatcctacagattgctcaaacagcttggaaaaggggctaacggtattgtatatctggcagaagcatcaggcggacaggtcgctttgaaaataagcagcgacagcatgtctgttacctctgaagtgaatgtcttaaaatccttttcaaaggcccggtcgcaaacgatggggccttctttttttgatgcggacgatgcgtttattccgcagctgaataaaaatgtctctttttacgtgatggagtacatagaagggccgcttcttccgcaatatatcagcagtaagggagcggagtggattccggtgctgatggtgcagcttctttccagcttgtcagtccttcatcagcagggatgggtttttggcgacctcaaaccggaaaatcttattgtaaccggaccgccggctgccatccgctgcattgatgtagggggaacgacaaaacaaggccgcgcgattaaagagtatacggagttttacgacagggctattgggggtatggaacaagaaaagcagaaccatcctatgacctgtttgctgtcgcaatga

SEQ ID NO: 156 - protein, 207 aa, Bacillus amyloliquefaciens
MMNDALTSLACSLAPGTAIQGKWNGKSYRLLKQLGKGANGIVYLAEASGGQVALKISSDSMSVTSEVNVLKSFSKARSQTMGPSFFDADDAFIPQLNKNVSFYVMEYIEGPLLPQYISSKGAEWIPVLMVQLLSSLSVLHQQGWVFGDLKPENLIVTGPPAAIRCIDVGGTTKQGRAIKEYTEFYDRAIGGMEQEKQNHPMTCLLSQ

SEQ ID NO: 157 - DNA, 1152 bp, Bacillus amyloliquefaciens
atggcaaatgaaacgtatgaatcattaaacaaacgtttaatcaatatccgccgcgaccttcatgaacaccctgagctgtcaggcgaggaattcgaaacgacgaataaaatccgccgctggctggaggaagaaggaatcacggttcttgatgtgccgaaacttcaaaccggagtgatcgctgaaatcaaaggagataaaagcggccccgtcatcgccgtcagagcggacatcgacgcactgccgatcgaagagaaaacaaaccttccgtttgcttcgcgcaacagcggcgtgatgcacgcatgcggccatgatttccatacggcatctatcctcggcacggctttcttattaaatgagagaaagcatgagctgaaaggaacggtgcggtttatttttcagcccgcggaagaaatcgccgccggagcaagacaggtcattgaagccggcgcgcttgacggtgtatcggcgatattcggcatgcataacaaacctgacctccccgtcggcacggtcggtctgaaagaaggcccgcttatggcgagtgtcgaccgctttgaaatcaccgtgaaaggaaaaggcggccacgccggaatccccgacaacagcattgacccgattcaggcgacagggcagatcatcggcggcctgcaatcgattgtcagcagaaacatcagctcgcttcacaatgccgtcgtcagcatcacaagagttcaggggggcagttcttggaatgtcattccggaccatgttgaaatggaaggaaccgtccggacgtttcaaaaagaagcgcgggacgctgttccgaaacatatgaagcgggttgccgaaggaatcgcggccggattcggggcagaggctgacttccgctggtttccttacctgccgtcagtgatgaacgatgcccgattcatacaggcggcggaacaaacggctgaaagcctcggacttcaaaccgttcgggcagaacagtcgcccggcggcgaagacttcgcattatatcaagaaaaaatccccggcttcttcgtctggatgggaacaaacggaacagaagaatggcaccatccagcctttacactcgacgaaaaagcgcttccgaaagcggctgagtttttcgcccggcttgccgtcaatgtattggagcagacggaatga

SEQ ID NO: 158 - protein, 383 aa, Bacillus amyloliquefaciens
MANETYESLNKRLINIRRDLHEHPELSGEEFETTNKIRRWLEEEGITVLDVPKLQTGVIAEIKGDKSGPVIAVRADIDALPIEEKTNLPFASRNSGVMHACGHDFHTASILGTAFLLNERKHELKGTVRFIFQPAEEIAAGARQVIEAGALDGVSAIFGMHNKPDLPVGTVGLKEGPLMASVDRFEITVKGKGGHAGIPDNSIDPIQATGQIIGGLQSIVSRNISSLHNAVVSITRVQGGSSWNVIPDHVEMEGTVRTFQKEARDAVPKHMKRVAEGIAAGFGAEADFRWFPYLPSVMNDARFIQAAEQTAESLGLQTVRAEQSPGGEDFALYQEKIPGFFVWMGTNGTEEWHHPAFTLDEKALPKAAEFFARLAVNVLEQTE

SEQ ID NO: 159 - DNA, 444 bp, Bacillus amyloliquefaciens
gtgacatggattgcagttgtttcaattgttgtcataagcctgattaagattgtgctgacatgccttcctaccggagcggtggaatggatcctccgcaagtttgaaacccattcaaagctcagtgacgagtccgctgccgtttccctcgggggaaaacgtctggaaggcgaagacaaacgacgggtgattgatgattttaacgaagccgtgtttatcgaacggcattatatatacccaggggatgaagagcgttatcttcatccgcaaaacggagccgatccgcttgtcattaagacgagaaaaggaaaaaaagatgtgacggtgtttgtatacagctacgaagatcatgtagatgtcgtcaagcagcagaaaaagaaagtaatcgcttattcagttctttccgacagcctgcaaaagcgcactatggccgccgccgggagctga

SEQ ID NO: 160 - protein, 147 aa, Bacillus amyloliquefaciens
MTWIAVVSIVVISLIKIVLTCLPTGAVEWILRKFETHSKLSDESAAVSLGGKRLEGEDKRRVIDDFNEAVFIERHYIYPGDEERYLHPQNGADPLVIKTRKGKKDVTVFVYSYEDHVDVVKQQKKKVIAYSVLSDSLQKRTMAAAGS

SEQ ID NO: 161 - DNA, 414 bp, Bacillus amyloliquefaciens
atgatgacgtcggatcatgattcgggagaatatgaacggctcatgaaaatgattgaatccattacgctgacgctctatgatatgaaaaaaattgtgatagccgccatccacggagccgcggcggggctcgggctgagtttcgcgctgtgcgccgatgtggtgctcgccgaagaaaacgcccgactcgcgatgaatttcatcggcatcggattggttcccgacggaggaggccattatttattaatgagacgcgtcggtgagatcgaagcgaaaaaactgatttggagcggtgaaaaattgccggctgaaaaagcggtgcggctcaagcttgccgacgggctgttcagcggcggccctgcggaggggcacaaccgtatatcgaccgattgctgcatgcgccgctgtcagcgatga

SEQ ID NO: 162 - protein, 137 aa, Bacillus amyloliquefaciens
MMTSDHDSGEYERLMKMIESITLTLYDMKKIVIAAIHGAAAGLGLSFALCADVVLAEENARLAMNFIGIGLVPDGGGHYLLMRRVGEIEAKKLIWSGEKLPAEKAVRLKLADGLFSGGPAEGHNRISTDCCMRRCQR

SEQ ID NO: 163 - DNA, 591 bp, Bacillus amyloliquefaciens
atggcgggagaaggaaagcctttgccgattgaattttaccagagaccgtcagtggagcttgcccctttattgctcggctgtctccttgtgaaggagacggatgagggaacggcttcaggttatatcgtggaaacggaagcttatatgggagcggatgaccgggcggcgcacagtttcggcaaccggcgcacgaaacggacggaaattatgttccatgaggcgggccgcatttatacatacgtcatgcacactcatacattaatgaacgtcgtcgcctcggacatcggcattccgcaggccgtgttaatcagggcggcggagcctcatgaaggacagttcctgatggagagcaggagaccgggcagacccccgagagagtggacaaacggcccgggaaaactgacgaaggcgatgggcatttcaatgaacgactacggcggcatgatcacggaaccgccgctgtatattacggagggctttacgcctgaacatatatcaacaggcccgagaatcgggattgacaacagcggagaagcccgggattatccgtggcgctattgggtgacggggaaccggtatgtctcacgctga

SEQ ID NO: 164 - protein, 196 aa, Bacillus amyloliquefaciens
MAGEGKPLPIEFYQRPSVELAPLLLGCLLVKETDEGTASGYIVETEAYMGADDRAAHSFGNRRTKRTEIMFHEAGRIYTYVMHTHTLMNVVASDIGIPQAVLIRAAEPHEGQFLMESRRPGRPPREWTNGPGKLTKAMGISMNDYGGMITEPPLYITEGFTPEHISTGPRIGIDNSGEARDYPWRYWVTGNRYVSR

SEQ ID NO: 165 - DNA, 294 bp, Bacillus amyloliquefaciens
atgaatgaagaatacacatatgcagcagatagtgatatgagaccgtttggacggcccggatttgggtttggacggccgggcttcgggttcgggcggcccggattcggcttcggcttcgggcggccgggttttggatttggccggccttggtttggttatggattcggacggccgtttggtttttacggcggaccgttcttcggagggcttgtcggggggcttgtcggaagcgctttattcaatccgtacctgtacggaggttacggctacccttactatccgtattactactaa

SEQ ID NO: 166 - protein, 97 aa, Bacillus amyloliquefaciens
MNEEYTYAADSDMRPFGRPGFGFGRPGFGFGRPGFGFGFGRPGFGFGRPWFGYGFGRPFGFYGGPFFGGLVGGLVGSALFNPYLYGGYGYPYYPYYY

SEQ ID NO: 167 - DNA, 966 bp, Bacillus amyloliquefaciens
atgaacgataacttcaagaaaaccaatcgtatttcaatgcttcagcaattgcagattaatggcagtgaacaaaccattatgattaatggtgatgacaggagtagtccgctgcttttgtttttgcatggcggtcccggcacgcctcaaatcggttatgcgagaaaataccagaatgagctggaaaagcatttcaccgttgtgaactgggatcagagaggggcgggtctctcttattcaaaggaaattccgggttcatctatgactttggatcagctgacagctgacaccattcatctgaccgaacgcttatgcaagcaattcagcaggagaaaaatatatatcgccggctattcgtggggttcagttttggcgcttcaagttcttcaagagaaacctgatttgtattatgcgtatatcggtatcagtcaggtggttaatattcaaaaggaagaaacggaagcctaccggttgatgatggaatggagcaggcaacacaaacatatcctgctgggcaagacgctgagctttatcggagcacccccatgggagaaacagctgcagcgaacgctgtttctgctttgtattgaaatgaggggagggggctttacccatcatccgatcggcgctcttaaagcaggggggcgaatgctgtttggtgaaccgtacggtgtgagagggagcttcttagccgcgcggggacaaatgttcagcctgaaacacctgtgggaggatctcatttcctttgatgcaggggaatcagtttcttctattgtaataccgtgctgttttatgtcagggagatacgatttgacggttccggggacgacgtcttatgaatattatcagaaggttgatgcgccgtataaagaatggcattggtttgagaactcagcccattcgcctcacttggaggaaccggatcgctttgccgaagttgtcagccggttcgcatcgttccatctctga

SEQ ID NO: 168 - protein, 321 aa, Bacillus amyloliquefaciens
MNDNFKKTNRISMLQQLQINGSEQTIMINGDDRSSPLLLFLHGGPGTPQIGYARKYQNELEKHFTVVNWDQRGAGLSYSKEIPGSSMTLDQLTADTIHLTERLCKQFSRRKIYIAGYSWGSVLALQVLQEKPDLYYAYIGISQVVNIQKEETEAYRLMMEWSRQHKHILLGKTLSFIGAPPWEKQLQRTLFLLCIEMRGGGFTHHPIGALKAGGRMLFGEPYGVRGSFLAARGQMFSLKHLWEDLISFDAGESVSSIVIPCCFMSGRYDLTVPGTTSYEYYQKVDAPYKEWHWFENSAHSPHLEEPDRFAEVVSRFASFHL

SEQ ID NO: 169 - DNA, 756 bp, Bacillus amyloliquefaciens
gtggctgaaagcttgttaatcagcggtgcggacatcgtaacagaaaaagaaatcatccgaaacggttttctcggtataaaggacggcatcatttcttacgcgggaaaaacaaggccgcaagaaacgtatgagaaggaatggaaggcgcccgagggctcgtatgcgcttcccggaatgattgatatccatattcacggcggatacggcgcggatacgatggatgccgatgttgcggctcttgatacactgtccgcccggctgcccgaagaaggaacaaccgcttttttagcgacaacgatcacacagcagcacgaaaacattgaaaaagcgctcatcaacgccaaaaaatgggcgtattcctcaccggagacccaaaaaggcgctgagttgatcggcattcatttagaaggaccgtttgtctctccgaaaaaggcgggagcacagccgaaacaatggattactcctgctgatgccgggctctttcagaaatgggagcggctctcgggagggctgatcaaaatcgtgacgcttgcgccggaagaagatcctgatttcagcctgatccgttatttaaaaaaccaaaacatcatcccctcaatgggacacacagacgcaggagccgagcttttacaaaaagcggcggatgccggggcggtgcatatgacgcacctctttaacgccatgagctcctttcatcaccgtgagccgggggcatcggtacggctctcgcctgcggccgcatcacggcggagctga

SEQ ID NO: 170 - protein, 251 aa, Bacillus amyloliquefaciens
MAESLLISGADIVTEKEIIRNGFLGIKDGIISYAGKTRPQETYEKEWKAPEGSYALPGMIDIHIHGGYGADTMDADVAALDTLSARLPEEGTTAFLATTITQQHENIEKALINAKKWAYSSPETQKGAELIGIHLEGPFVSPKKAGAQPKQWITPADAGLFQKWERLSGGLIKIVTLAPEEDPDFSLIRYLKNQNIIPSMGHTDAGAELLQKAADAGAVHMTHLFNAMSSFHHREPGASVRLSPAAASRRS

SEQ ID NO: 171 - DNA, 219 bp, Bacillus amyloliquefaciens
ttgctgcgcgccttaaaactgtcactcgcgatgctgattattatacttgcggccgccgcatttacgtatgcggaacatacctccgtcatacagccggttatgctcgtgtttctcggtgcggtcatgttcattcagggctggaggaaaaacggaaagaaaacgacggctccgggaaattcaatatctataccgccgtttttgtatggtcgatctccttaa

SEQ ID NO: 172 - protein, 72 aa, Bacillus amyloliquefaciens
MLRALKLSLAMLIIILAAAAFTYAEHTSVIQPVMLVFLGAVMFIQGWRKNGKKTTAPGNSISIPPFLYGRSP

SEQ ID NO: 173 - DNA, 606 bp, Bacillus amyloliquefaciens
ttgtctaaaacatatcaaaagtggatcgtattgggattattttttatcgtactgtgcacaggccgctcggcttttgcggcgacatctcagactcagacgggaggcctcgggaatatcggttttttccacgattacctgatcgagccgttttcggcacttttaaaaggggtggcgggcctgttccacggtgagtacggactgtcgattattctggtgacgattatcgtccggatcgttgtattgcctttgtttgtgaaccaatttaagaaacagcgggtgttccaggaaaaaatggctgtgatcaaaccgcaggtcgacagcattcaggctaaaatgaaacaaacgaaagatgcggaaaaacaaaaagaactgcaaatggaaatgatgaagctttaccgtgagcacaatctgaatccgatggcaatgggatgtcttccgatgctggtgcaattcccgattttgatcggtttttattacgccatccgctcaacgccggaaattgcttcacactcatttctgtggttcagcttagggcattctgatattcttgtatcactgtgcgcggggccatgtatttcttacaggcttatatttcccaaaaattaa

SEQ ID NO: 174 - protein, 201 aa, Bacillus amyloliquefaciens
MSKTYQKWIVLGLFFIVLCTGRSAFAATSQTQTGGLGNIGFFHDYLIEPFSALLKGVAGLFHGEYGLSIILVTIIVRIVVLPLFVNQFKKQRVFQEKMAVIKPQVDSIQAKMKQTKDAEKQKELQMEMMKLYREHNLNPMAMGCLPMLVQFPILIGFYYAIRSTPEIASHSFLWFSLGHSDILVSLCAGPCISYRLIFPKN

SEQ ID NO: 175 - DNA, 1509 bp, Bacillus amyloliquefaciens
atgtcagatcaatttacgagccgtgaagaacgccgtaaggcaaggcagacgaaaagcactaagccctcttcaccgaaaaaaggcaagaaacagcgtaaaggcggtttattcaaaaagattgtgctgtccttggttattctgtttgtccttggcatagtcggcggagcggcggcatttgccgttttggtttccggcgcgccgtctttggacgaagccaagctgaaaacgccttactcttcaacgatttacgataaaaacggaaaagaaatcgcggaagtgggcggtgaaaaacgaacctacgtcccgattaaggatatacccgatgttgtgaaagaagcatttatcgcaactgaagacgcccgtttttataagcaccacggtatagacccgattcgtatcggaggcgctttggtcgccaactttacggatgggttcggttcagagggaggaagcacaatcacccagcaggttgtgaaaaactcgcttttgacccatcagaaaacgattaaacggaaagcacaggaagtgtggctttccctgcagctggagcgccattattctaaagatgaaatcttagaaatgtatttaaacagaatttatttctcaccgcgcgcctacggcgtcggaaaagcggctgaagaattcttcggcgtaaaagacttgagcaagcttacggttgaacaggcggcaacgcttgccggaatgccgcaaagcccgaccggatataacccggttaaaaacccgaaggcttccgaaaaacgacgaaacatcgttctcagcttaatggaaaaacaaggattcatttcaaactctgaataccaaaaagcgaagaaagtgtccatgaaagatgaaggcgtcgtcagccaaaaggaatacgataaaaaggacacaaataaatacagcgcttttgtcgaagaagttatgaaagaaattgagacaaaagaaaagaaagacgtcgatatttcaactgacggactgaaaatttacacgactcttgatacgaaagcacaagattatcttgatcaattgatgaacggcgatacagccggatttaccgaaggcatgcagggcggcgtcacgctccttgatacgacaaacggagaaatccgcgccatcggggcaggacggaacagaactaccgggggattcaattatgcaacacaaggtaaaacccagcccggttcgacgataaaaccgattcttgattacggaccggtcattgaaaataaaaaatggtcgacgtatgaacagattgacgactcagcttatacgtactctgacggcacaccgattcatgattgggacaataaatacagaggccagatatcaatgcgagaggccctcgcagactcacgtaatattcctgctttaaaagcataccaagcagcaggaaaagatcatgccgtcgacttcgcaaacgacttaggattgggattaaacaaagatcaagtatatgaaccctactctatcggggatttggtgagggtaaccgcggtgtatctactatga

SEQ ID NO: 176 - protein, 502 aa, Bacillus amyloliquefaciens
MSDQFTSREERRKARQTKSTKPSSPKKGKKQRKGGLFKKIVLSLVILFVLGIVGGAAAFAVLVSGAPSLDEAKLKTPYSSTIYDKNGKEIAEVGGEKRTYVPIKDIPDVVKEAFIATEDARFYKHHGIDPIRIGGALVANFTDGFGSEGGSTITQQVVKNSLLTHQKTIKRKAQEVWLSLQLERHYSKDEILEMYLNRIYFSPRAYGVGKAAEEFFGVKDLSKLTVEQAATLAGMPQSPTGYNPVKNPKASEKRRNIVLSLMEKQGFISNSEYQKAKKVSMKDEGVVSQKEYDKKDTNKYSAFVEEVMKEIETKEKKDVDISTDGLKIYTTLDTKAQDYLDQLMNGDTAGFTEGMQGGVTLLDTTNGEIRAIGAGRNRTTGGFNYATQGKTQPGSTIKPILDYGPVIENKKWSTYEQIDDSAYTYSDGTPIHDWDNKYRGQISMREALADSRNIPALKAYQAAGKDHAVDFANDLGLGLNKDQVYEPYSIGDLVRVTAVYLL

SEQ ID NO: 177 - DNA, 1434 bp, Bacillus amyloliquefaciens
atgagtggcgataaaaaacatctggtcatcatcggcggcggcataacgggactagccgccgccttctacatggaaaaagaaatcaaggaaaaacagctgccgcttgaggtcaccctgatcgaagcgggcccgagagcgggcggcaaaattcagacggcgcataaagacggctacatcattgagcgggggccggattcttttttagaaaggaaaaaaagcgcgccgcagctcgttaaggatttggggcttgagcatctgctcgtcaacaatgcgaccggccagtcttacgtgctcgtcaatgagacgcttcatccgatgccgaagggcgcggtgatgggcattccgaccaaaatcgctccgttcatctccaccggtttattttctgtacccggaaaagcgcgggcggcgcttgactttgtcctgcctgcgagcaaaccgaaggaagatcagtctctgggtgaatttttccgcagacgcgtcggtgacgaagtcgttgagaatttaatagaaccgctattatcagggatttatgccggagatattgataagctgagcctcatgtccacgtttccgcaattctatcagactgagcaaaagcacagaagcctgattctcggtatgaaaaaatcacgtccgcagccttcgggacagcagctgacggccaaaaagcagggccagtttttaacggtgacgacaggacttcaaacgttggtggaggagctggaaaagcagcttacgctgacaaaggtgatgaaaggaacgaaagtcacccatatcggccgcgaggagaaaggatattccgtgacgcttgataatggcaaagtgctctatgcggaaggatgcatagtgacagccccgcataaagccgcggcgaaaatgctttctgatctgccggcggtttcatgtctcaaagatatgcattctacgtccgttgccaacgtcgccttaggttttcctgagggagccgtcaaaatggagcatgaaggtacgggattcgttatctcaagaaacagcgatttctccatcacggcctgcacatggacgaataaaaaatggccgcacgcggcgccggagggcaaaacacttctcagggcgtacgtcggaaaggccggagatgaatccatcgtagatctttcagataacgagatcattaaaatcgtaatggaagatttgaaaaaagtaatgaaaataaatggcgaaccggaaatgacctgtgtgacccgctggaacgaaagcatgccgcaataccatgtcggccataaggagcgcatcaaagagttcagagatgcgctgaaagcttcctatccgggcgtatacgcgacgggcgcgtctttcgaaggggtgggcatccccgactgtatcgaccagggaaaagccgccgtatatgattcactcgcttatttatttgaaacgtaccagcctccgttatcgtaa

SEQ ID NO: 178 - protein, 477 aa, Bacillus amyloliquefaciens
MSGDKKHLVIIGGGITGLAAAFYMEKEIKEKQLPLEVTLIEAGPRAGGKIQTAHKDGYIIERGPDSFLERKKSAPQLVKDLGLEHLLVNNATGQSYVLVNETLHPMPKGAVMGIPTKIAPFISTGLFSVPGKARAALDFVLPASKPKEDQSLGEFFRRRVGDEVVENLIEPLLSGIYAGDIDKLSLMSTFPQFYQTEQKHRSLILGMKKSRPQPSGQQLTAKKQGQFLTVTTGLQTLVEELEKQLTLTKVMKGTKVTHIGREEKGYSVTLDNGKVLYAEGCIVTAPHKAAAKMLSDLPAVSCLKDMHSTSVANVALGFPEGAVKMEHEGTGFVISRNSDFSITACTWTNKKWPHAAPEGKTLLRAYVGKAGDESIVDLSDNEIIKIVMEDLKKVMKINGEPEMTCVTRWNESMPQYHVGHKERIKEFRDALKASYPGVYATGASFEGVGIPDCIDQGKAAVYDSLAYLFETYQPPLS

SEQ ID NO: 179 - DNA, 1251 bp, Bacillus amyloliquefaciens
gtgctgactggatttacgccatggccggaagaatgggctgaaaaataccgaaaagacggctgctggaagggtgagacgttcggaggaatgctgaaagagcgcgcggctttatacggaaatcaaactgccgtgacgtgtaaagatgtacattggacctacaaagaattagatgaaagggccgatcgtttagcggcggggctgcataagctcggaattcaaaaggaagaccgcgttgtcgttcagctgccgaatatcgctgagttttttgaagtgattttcgcgctgttccgactcggagcactgcccgttttcgcgctgccttctcatagaagcagtgagattacgtatttctgcgagtttgcagaggcgaaagcatacatcattcctgatacgcattcaggttttgattacagggcgcttgccagacaggtgaaagacaaacttccggatttggcgcatgtcattgtggccggcgaagctgaagagtttcaggaactgagcagcctgcatagagagcctgttcagctggaagaggtaagcccggcggaagtcgcttttttacagctttcaggaggcagtacggggctgtccaagctgattccgcgaacacacgacgattacatatacagtttgcgcctcagcgcggaaatatgcggcttggatcatcacagcgtttatttggccgctctgccgacagcgcataattatccgctcagctcgccgggtgtgctgggaactttatatgccggaggccgtgttgttctgtcaccgacgccgagtccggatgactgcttcccgttaattgaaaaagaacgtgtcacgattacagcgctcgtcccgccgcttgcgatggtgtggatggacgcatccggttcgcgaagtgatgatttatcaagccttcaagtgctgcaggtgggaggcgccaaattcagtgctgaggcggcccgccgcgtaaagagcgctttcggatgcacccttcagcaggttttcggaatggcggaaggattggtgaattatacgagactggatgatcctgaagagatcattgtcaatacgcaaggcagaccgatgtcaccttttgatgaggtaagggttttagacgatgacgggcgggatgtcgccccggagaagcgggacatttgtttacacgcggcccttacacgattcgcgggtattataaagcgcctgaacataatgaaagatcattcacagccgacggattttatcagaccggcgatatcgtcaaactga

SEQ ID NO: 180 - protein, 416 aa, Bacillus amyloliquefaciens
MLTGFTPWPEEWAEKYRKDGCWKGETFGGMLKERAALYGNQTAVTCKDVHWTYKELDERADRLAAGLHKLGIQKEDRVVVQLPNIAEFFEVIFALFRLGALPVFALPSHRSSEITYFCEFAEAKAYIIPDTHSGFDYRALARQVKDKLPDLAHVIVAGEAEEFQELSSLHREPVQLEEVSPAEVAFLQLSGGSTGLSKLIPRTHDDYIYSLRLSAEICGLDHHSVYLAALPTAHNYPLSSPGVLGTLYAGGRVVLSPTPSPDDCFPLIEKERVTITALVPPLAMVWMDASGSRSDDLSSLQVLQVGGAKFSAEAARRVKSAFGCTLQQVFGMAEGLVNYTRLDDPEEIIVNTQGRPMSPFDEVRVLDDDGRDVAPEKRDICLHAALTRFAGIIKRLNIMKDHSQPTDFIRPAISSN

SEQ ID NO: 181 - DNA, 1629 bp, Bacillus amyloliquefaciens
atgaaagaaatgttaaaaataagcggcatcagttacgaaatcaacagcgttcccctttttgaacagatcagcgcgagtgttcagcaaggcgacatcatcggtgttatcggtaaaaacggcgccggcaaatctttattgctgcaattgatctgcaataaaaaagcgccgtcacaaggacagatccagatgatgcaagatgtgaacatatatatggtggaacaagaaacggaagcttatgattccggccatccggagcctgcggaggcagccttgttagaaaagtggaacgtgcccgcacgcgccttttcgcaattaagcggcggagaaaaattgaaagcccgtcttgccaaaggtttctcctcctcaagcggccttttgttattagatgagccgacgaaccacctcgatcagcacagtttagaaatactgcttaatcagatcaagaattacaaaggcaccattattttcgtttcacatgatcgtgcttttatagatgcggcggcgacaaaaatctgggccatcgaaggaaagaaactcattgaacataaagggaattattcaagctatatggaggtccgcaaacagagaaggctgacacagcagcgggaatatgagaatcagcagcatatgatcagacggattgaagctcaaatgaacgagctgagcgcctggtcaaaaaaagcccacgcccaatcaacgaaaatagaaggctttaaagaatatcaccgcgtaaaagcaaaacgcacggacgcccagattaaatcaaagcagaagcgtcttgaaaaagagcttgaaaaagcgaaagcagaaccggttgaagcggagtatgaagtccgtttttccattgagcaccgcaaaaaagcgggaaagcgttttttagaagtaagtgatgtcacaaagtcatatgaaggccgaacgctttttaaaaacgtgaatttcactgtgatgcacggtgaaaagatcgcgattacaggcccgaacggcagcgggaaaacaacattattgaaggtcatcctcggtcaggaaaaagcgcagggcggcatatggatttctccgtctgcaaacgtcggctatttaacccaggaagtattcgaccttccgcttgataaaacccccgaacagcttttttacaaagaaacgttcgaagcaaggggaaatgttcaatccctcatgaagcatttaggatttaccgcagcgcaatggacggaacccatcggcaagatgagcatgggagagcgggtcaaatgcaagctgatggcgtttattctgggggagaaagatgtgctgattctggatgagccgacaaaccaccttgatctgccgtcacgcgagcagcttgaagacactttggcccgatacgacggaacgctcatcatcgtatcgcatgatcgttactttgtcgaaaagacgacggacatccggcttgatatctcaaacggcagcgtccgaaaacaatggaaagaatctccctccgtcagggatgatgctgaagaactgcgattaaagtttgaaaccgaacggcaggaagtcctcggaaaactcagcttcatgactccggctgataaacaatatcgtgagcttgatcaaaagttcaaagagctgacggaagaaatcaagaagttgaaatga

SEQ ID NO: 182 - protein, 542 aa, Bacillus amyloliquefaciens
MKEMLKISGISYEINSVPLFEQISASVQQGDIIGVIGKNGAGKSLLLQLICNKKAPSQGQIQMMQDVNIYMVEQETEAYDSGHPEPAEAALLEKWNVPARAFSQLSGGEKLKARLAKGFSSSSGLLLLDEPTNHLDQHSLEILLNQIKNYKGTIIFVSHDRAFIDAAATKIWAIEGKKLIEHKGNYSSYMEVRKQRRLTQQREYENQQHMIRRIEAQMNELSAWSKKAHAQSTKIEGFKEYHRVKAKRTDAQIKSKQKRLEKELEKAKAEPVEAEYEVRFSIEHRKKAGKRFLEVSDVTKSYEGRTLFKNVNFTVMHGEKIAITGPNGSGKTTLLKVILGQEKAQGGIWISPSANVGYLTQEVFDLPLDKTPEQLFYKETFEARGNVQSLMKHLGFTAAQWTEPIGKMSMGERVKCKLMAFILGEKDVLILDEPTNHLDLPSREQLEDTLARYDGTLIIVSHDRYFVEKTTDIRLDISNGSVRKQWKESPSVRDDAEELRLKFETERQEVLGKLSFMTPADKQYRELDQKFKELTEEIKKLK

SEQ ID NO: 183 - DNA, 1920 bp, Bacillus amyloliquefaciens
atgaatcgggtcttccgtaataccattttttatttacttattttattagtagtaatcggggttgtgagttacttccagacctcaaacccgaaaacagaaaatatgtcgtacagtacgtttatcaagaacctcgatgaagggaaagttgatagcgtatcggttcagcctgtcagaggtgtttatgaggtaaaaggacagctgaaaaaatacgacaaagaccagtactttttaacacatgttcctgaaggaaaaggagcagaccagatatttgacgcaattaaaaagacggacgtaaaagttgatcccgcacaggaaacaagcgggtgggtgacgttcttaacgacgatcattccgtttgtcatcatctttattctgtttttcttcctgctcaatcaggctcagggcggcggcagccgtgtcatgaacttcggaaagagcaaagcgaagctgtatacggaagaaaagaaacgcgtgaagtttaaagatgtagccggcgcggatgaggagaagcaggagctcgttgaggttgttgagtttctgaaagatccccgcaaattcgccgagcttggcgccaggatccctaaaggcgtgctgcttgtcggacctccgggaaccggtaagacattgcttgcgagagcctcagccggtgaagctggcgttcctttcttcagcatcagcggatctgacttcgttgaaatgtttgtcggtgtcggtgcttcccgtgtgcgtgatttattcgaaaatgcgaaaaagaatgcgccttgcctgatcttcattgatgagatcgacgcggtaggacgtcagcgcggcgccggtcttggcggcgggcatgatgaacgcgaacagacgctgaaccagctgcttgttgagatggacggtttcagtgcgaatgaaggaatcattattatcgctgcgacaaaccgtgcggacattcttgaccctgcattgctccgtccgggacgttttgaccgtcagattacggtagaccgtccggatgtcatcggccgtgaagccgtattgcaggtgcatgcgagaaacaaaccgcttgatgagacggtgaacttaaaagcaatcgcttcaagaacacccggtttctcaggcgcagatttagaaaaccttcttaacgaagcggcactcgttgctgcccgtcaaaacaagaagaaaattgatatgcgcgacattgatgaagcaacggaccgtgtcattgcgggtcctgcgaagaagagccgcgtcatctcgaaaaaagaacgcaatatcgtggcgtaccacgagggcggtcacaccgttatcggacttgtgctggatgaagccgatatggttcataaagtaacgattgttccgagggggcaggcaggcggatacgcagtcatgcttccgagagaagaccgttacttccagacaaaacctgaacttctcgataaaattgtcggtcttctgggcggacgtgttgccgaggaaattatcttcggcgaagtcagcacgggggctcacaatgacttccagcgggcaacgaacattgccagaagaatggtgacagagttcggtatgtcagaaaaactcggaccgcttcagttcggtcaatctcaaggcggtcaagtattcctgggccgggatttcaacaacgagcaaaactacagtgatcagatcgcttacgaaattgatcaggaaattcagcgcatcattaaagaatgttatgagcgtgcgaaaaccatcctgactgaaaatcgcgataagcttgaattgattgctcagacattgcttgatgtggaaacattagatgcggaacaaatcaagcatctcgtggatcacggaaaactccctgagcgcaatttctcagatgaccatcttcaaaaagacgatgtgaaagtaaacatcctgtctaaaacagaagacgaaaagaaagacgagccgaaagaatag

SEQ ID NO: 184 - protein, 639 aa, Bacillus amyloliquefaciens
MNRVFRNTIFYLLILLVVIGVVSYFQTSNPKTENMSYSTFIKNLDEGKVDSVSVQPVRGVYEVKGQLKKYDKDQYFLTHVPEGKGADQIFDAIKKTDVKVDPAQETSGWVTFLTTIIPFVIIFILFFFLLNQAQGGGSRVMNFGKSKAKLYTEEKKRVKFKDVAGADEEKQELVEVVEFLKDPRKFAELGARIPKGVLLVGPPGTGKTLLARASAGEAGVPFFSISGSDFVEMFVGVGASRVRDLFENAKKNAPCLIFIDEIDAVGRQRGAGLGGGHDEREQTLNQLLVEMDGFSANEGIIIIAATNRADILDPALLRPGRFDRQITVDRPDVIGREAVLQVHARNKPLDETVNLKAIASRTPGFSGADLENLLNEAALVAARQNKKKIDMRDIDEATDRVIAGPAKKSRVISKKERNIVAYHEGGHTVIGLVLDEADMVHKVTIVPRGQAGGYAVMLPREDRYFQTKPELLDKIVGLLGGRVAEEIIFGEVSTGAHNDFQRATNIARRMVTEFGMSEKLGPLQFGQSQGGQVFLGRDFNNEQNYSDQIAYEIDQEIQRIIKECYERAKTILTENRDKLELIAQTLLDVETLDAEQIKHLVDHGKLPERNFSDDHLQKDDVKVNILSKTEDEKKDEPKE

SEQ ID NO: 185 - DNA, 666 bp, Bacillus amyloliquefaciens
atgggcatagcaggaacgtttctatttatgatcgtgatcggagccgcgatcggcgcggtgacgaatcatcttgccattcagatgttatttcgtccgtaccggccgtattacctgttcggaaaacgggttccgtttacgccggggctgatcccgaaaagacgggatgaattggcaaaacaaatggggctcatggtgacgaaccaccttttaaccccggaaggaataaaaaagcggcttttatcagataacgttaaaaaccaggcgcttcttttcgccgaacaattcacgcaaaaaatggccgcttccgaaatgacggtgcacgaagctttggccgccgcgggcatccggaatccgcaggaaaagacggatgcctggattgaccgttttaccgatgaaaagctttcggacctgtaccggaaatatgagcaccgcgccatcaaagactggcttcctgatgagctgcaggaaaagctggatgaaaaaatcccgctggccgcagattatatcctgaagcgtagcattgattattttgagagcgaagaagggaaagacagactcggaaatatgattgacgactttttgaattcccggggatgctcggcggcatggtgcagatgttcctcggcaattcaagcttggcagaccgtgtgctgcctgagctgttaa

SEQ ID NO: 186 - protein, 221 aa, Bacillus amyloliquefaciens
MGIAGTFLFMIVIGAAIGAVTNHLAIQMLFRPYRPYYLFGKRVPFTPGLIPKRRDELAKQMGLMVTNHLLTPEGIKKRLLSDNVKNQALLFAEQFTQKMAASEMTVHEALAAAGIRNPQEKTDAWIDRFTDEKLSDLYRKYEHRAIKDWLPDELQEKLDEKIPLAADYILKRSIDYFESEEGKDRLGNMIDDFLNSRGCSAAWCRCSSAIQAWQTVCCLSC

SEQ ID NO: 187 - DNA, 1329 bp, Bacillus amyloliquefaciens
ttgaaaaaactcataaccgaggaggacattgcgtcactcgtatccgtgacagacccgcaatatgcccctgacggcagaagagccgcttacgtccggacaacagtcaatcataagcgtgattcctattcctcagccattatggtatatgacacagaatccggcatctcaaacccgtggactttcggggacgataaaaatacaagtccgcggtggtcgcctgacggtcggcgcctcgcctttgtttctgacagggaggacggcatccctcagctgtacatcatcgacgctgccggcggagaggcggaacaggctgccgatattccttggggcgtatcagatccgatatgggcgcccgacggcagatccgtgcttgtgtccgtcagtctgacatcagcggagcgcgccgatgagaaagaaaaaaagaagcatgacgagtatgagccggttgagattcaatcattaacatataaacgtgacgggaagggcctgctgaacggaagccggacacagcttgtgctgattcatcttgaaacgggggagattcagcagctgacagatcatgaagctgatcattatggcgcggccttttcaccggatggcaggcagcttgcgtttaccgccaatttatgcgagccgggtgacgccggaaagccgagcgatgtctatctgatgaatctggcggacggaagcctgaagcagattacgccgcaccgcggttctttcggttcctgcgtgttttcaccggacggttcttatatcgcgatgctgggccatgagaatgaatttcgcaatgcgactttagagaaagcgtggctgtacgacgtgaaaactgagcggctgtcctgcctgaccgacatgctggatgttcatttgagcgatgcgctgattgcggattcaatcataggaggagtgacgccccggccggtatggacaaacgacgggcagggcttttacgttctcgggagcgagcagggaagcaccggtatttattatatctcgattgacggcctcgtatatccgatccgattagaagaagagtacgtgaacggttttgcttttcatcctgatcagaaaagctgtatcgctgtcattgccaaacccgcacagccttccgagctttacagcatttcacttgaaaatggggaagagaggcaattgacattttacaatgatcggtttatagaggagcgtatcatatccgtgccggaaaagctgcaatatgaaacaaaggacgggctgacggtaaacggctggtttttaaagccttccgtttttgaagaggatcaaacatatccctcattctatacatacacggcgggcctcacatga

SEQ ID NO: 188 - protein, 442 aa, Bacillus amyloliquefaciens
MKKLITEEDIASLVSVTDPQYAPDGRRAAYVRTTVNHKRDSYSSAIMVYDTESGISNPWTFGDDKNTSPRWSPDGRRLAFVSDREDGIPQLYIIDAAGGEAEQAADIPWGVSDPIWAPDGRSVLVSVSLTSAERADEKEKKKHDEYEPVEIQSLTYKRDGKGLLNGSRTQLVLIHLETGEIQQLTDHEADHYGAAFSPDGRQLAFTANLCEPGDAGKPSDVYLMNLADGSLKQITPHRGSFGSCVFSPDGSYIAMLGHENEFRNATLEKAWLYDVKTERLSCLTDMLDVHLSDALIADSIIGGVTPRPVWTNDGQGFYVLGSEQGSTGIYYISIDGLVYPIRLEEEYVNGFAFHPDQKSCIAVIAKPAQPSELYSISLENGEERQLTFYNDRFIEERIISVPEKLQYETKDGLTVNGWFLKPSVFEEDQTYPSFYTYTAGLT

SEQ ID NO: 189 - DNA, 621 bp, Bacillus amyloliquefaciens
atgaaaacagcaggcatttacctggcagccggtacaagcagacgcatgggaacggataagcgaagtttatttctcaatggcgtttccctcggaagtatggctcttaaaaatgccttgttatctgaattagatcatatttttgttattacgagaaagggagattcactgcattggctttcggattttttctttttagatcccatgtcaaataagtggagccaggcagaatgtgagcaagcgggtaagggccaaggccattctatacaatgcggtttgcaaaaagcggcagcgtacgaggctgacgccgttatcattctccttgcagatcagccgtttgtcaccgcagatatcatcaatacgttaattgattcctatcaaaaagagcgccgttattcatttatcgccgctgaaaatcagcatcttcctatgccccccattttattctcaaatcaatgtttcccggtattgcatcagttaaagggagatcagggcgcccggcatgtgatccgtgaaagtatgatcaatatgggaaaaatgatcagctttcaagaccctttgcttttttatgacgtcgatacagttgaagattatacgctgctgctgaataaattcggggagtga

SEQ ID NO: 190 - protein, 206 aa, Bacillus amyloliquefaciens
MKTAGIYLAAGTSRRMGTDKRSLFLNGVSLGSMALKNALLSELDHIFVITRKGDSLHWLSDFFFLDPMSNKWSQAECEQAGKGQGHSIQCGLQKAAAYEADAVIILLADQPFVTADIINTLIDSYQKERRYSFIAAENQHLPMPPILFSNQCFPVLHQLKGDQGARHVIRESMINMGKMISFQDPLLFYDVDTVEDYTLLLNKFGE

SEQ ID NO: 191 - DNA, 630 bp, Bacillus amyloliquefaciens
ttgctgaaaataggttcacacgtctcaatgagcggaaaacatatgctccttgccgcaagcaaggaagctgtttcgtacggggcgaatacatttatgatctatacgggcgctccccaaaacacgcgccgcaaaaaaattgaagacttgaatatcgaagcgggccgcgcccatatgaaggaaaacggcatcgatgagattgtcgtgcatgcgccgtacatcattaacatcggaaatactacaaatccggcaacgtttgagctgggtgttgattttctgcgttctgaaattgaaagaacggcagcaatcggcgcgaaacagatcgtgcttcatccgggagcgcatgtcggagccggggctgagacgggcatcaaaaaaatcattgaaggtttaaacgaagtgattgttcccggtcaaaacgtgcagattgcgctggaaacaatggcgggcaaaggatcagaatgcggaagaagctttgaagagctggccgagatcattgcggggttacgcataatgaacatctatccgtctgctttgacacttgccacacccatgacgccgggtatgatgtcgccaatgattttgacggtgttcttaacgagtttgataaaatcgtcggcatcgatcggataa

SEQ ID NO: 192 - protein, 209 aa, Bacillus amyloliquefaciens
MLKIGSHVSMSGKHMLLAASKEAVSYGANTFMIYTGAPQNTRRKKIEDLNIEAGRAHMKENGIDEIVVHAPYIINIGNTTNPATFELGVDFLRSEIERTAAIGAKQIVLHPGAHVGAGAETGIKKIIEGLNEVIVPGQNVQIALETMAGKGSECGRSFEELAEIIAGLRIMNIYPSALTLATPMTPGMMSPMILTVFLTSLIKSSASIG

SEQ ID NO: 193 - DNA, 816 bp, Bacillus amyloliquefaciens
atgatcgggtttctcggttttctcattgaaatggcgtccgatgccgttgaaatgacggttcagttttccggcggcaagcagattatgatgccggacaagctggcggatattgcggttatcgctgtttctcacacatttattgtgctgagttttttcaacgtgatgaagctgcacgaatctcaggtcagggaaaaacaaacgagaaagcagcatgagcacatgctgatgattgtgtctaacttatatgaagaaacgattcatctgaaaaaaacgctgaaaacgacggagcatgtgacgaaagaatcctatcagctgtatcgggaaatgagcgggaacgaccgggagctcgggagccgaatgctgcgccttgcgggagaaattcatgaagtgaaaaaagacaatcagcgaatattcgccggcctgtcgaagctgatttcaaatgagagattccgggattacatgaatgccgccgatctggtcggcctcgttatccgcatcaatgaaaaatacgccgaatctttaggcaaagacattcaattcaaaaacgtgattgaaggagaacaccccgattatcacgtctttaccgtcctgtcgatcttaaataacctgaccgccaatgccgtcgaagccatgggtgacaggggtgagatccgcctcgcgctgcgcagggcggaggggggatggccgaatttgaggcggaagatgacggtcccggcattccggaaaaaatcggagaggtcgtttatgatcccggttttacgtccaaatacgatgaattcggcgcaccttcaacgggcatcgggctttcatacgtga

SEQ ID NO: 194 - protein, 271 aa, Bacillus amyloliquefaciens
MIGFLGFLIEMASDAVEMTVQFSGGKQIMMPDKLADIAVIAVSHTFIVLSFFNVMKLHESQVREKQTRKQHEHMLMIVSNLYEETIHLKKTLKTTEHVTKESYQLYREMSGNDRELGSRMLRLAGEIHEVKKDNQRIFAGLSKLISNERFRDYMNAADLVGLVIRINEKYAESLGKDIQFKNVIEGEHPDYHVFTVLSILNNLTANAVEAMGDRGEIRLALRRAEGGWPNLRRKMTVPAFRKKSERSFMIPVLRPNTMNSAHLQRASGFHT

SEQ ID NO: 195 - DNA, 1725 bp, Bacillus amyloliquefaciens
atgggcacaaatgtacaggcggattctttgtctgccgattgtacaaaaacaatgaacggggctctgatgctgattgaatcattaaagaaagaaaatgtcgagatgatcttcggctatccggggggagccgtccttccgatttacgataaactgtatcaatcaggattggttcacatcctgccccgccacgagcaaggcgcgattcatgcggcagaagggtatgcgagagtctccggaaagccgggggttgtgattgctacctccggacccggagcgacaaatttagttaccggtcttgcggatgcgatgattgattcactgccgctcgtagtgtttaccggtcaggtcgccacttcggtcatcggcagcgacgctttccaggaagccgacattttaggaattacgatgccgattacgaaacacagctaccaagtccgccgtccggaagatctcccccgtgtgattaaagaggcgttccatattgccacgacgggaagaccgggcccggtattaattgatataccgaaggatgtcgcagcatttgaaggagaattcagatatgatcacgagatcaatcttccgggttatcagccggtaaaagagcctaactatctgcagatccgaaagctcgtggaagctgtcagcagtgcgaaaaagccggttattttagccggagcgggtgttttgcacggtaaagcttcagaagatttaaaaaattatgccgaacagcagcaaattccggtagcgcacacgcttctcggtctgggcggtttcccggcagaccatcctctttttctgggaatggcggggatgcacggcacatacacagcgaatatggcgctttaccactgtgacttgctgatcagcatcggagcgcggttcgatgatcgcgtgaccggaaatctgaagcattttgcaaaatcggccaaagtagcgcatatcgatattgatcctgctgaaatcggaaaaattatcgaaacgcagattccggtggtcggcgacagtaaaatcgtccttcaggaattattgaagcaaaacggaaaacagggacagacagaggaatggaaacagcagctttcagaatggaaagaagaatatccgctttggtatacagacgacagagaagagggcttgaaaccccaaaagctgattgagtatattcaccaattcacaaacggtgaggcgattgtggcgacggatgtcggccagcaccagatgtgggcggctcagttttatcctttccgaaaggctgataagtgggtgacctcgggggggctcggcacaatgggcttcggccttccggcggccatcggagcgcagctggccgatcgtaacgccacggtcgttgccatcctcggagacggcggttttcagatgacccttcaggaattagatgtcatccggcagctgaatcttcctgtcaaagtggttatcttgaacaacgaatgtctgggcatggtcagacagtggcaggaaatcttctatgaagaacgctattctgaatccaaattctcggcgcagcctgactttgtcaaattgtcagaagcctacggcattaaaggcgttcggatttcatcggaagaagaggcggaagaagagcttaaaaaggcgctttcatcaaaagaaccggccgttattgacgtccgggtcgccaaaagcgagaaagtattcccgatgatcgcgccgggtaaaggacttcatgaaatggtgggggtgaaaccttga

SEQ ID NO: 196 - protein, 574 aa, Bacillus amyloliquefaciens
MGTNVQADSLSADCTKTMNGALMLIESLKKENVEMIFGYPGGAVLPIYDKLYQSGLVHILPRHEQGAIHAAEGYARVSGKPGVVIATSGPGATNLVTGLADAMIDSLPLVVFTGQVATSVIGSDAFQEADILGITMPITKHSYQVRRPEDLPRVIKEAFHIATTGRPGPVLIDIPKDVAAFEGEFRYDHEINLPGYQPVKEPNYLQIRKLVEAVSSAKKPVILAGAGVLHGKASEDLKNYAEQQQIPVAHTLLGLGGFPADHPLFLGMAGMHGTYTANMALYHCDLLISIGARFDDRVTGNLKHFAKSAKVAHIDIDPAEIGKIIETQIPVVGDSKIVLQELLKQNGKQGQTEEWKQQLSEWKEEYPLWYTDDREEGLKPQKLIEYIHQFTNGEAIVATDVGQHQMWAAQFYPFRKADKWVTSGGLGTMGFGLPAAIGAQLADRNATVVAILGDGGFQMTLQELDVIRQLNLPVKVVILNNECLGMVRQWQEIFYEERYSESKFSAQPDFVKLSEAYGIKGVRISSEEEAEEELKKALSSKEPAVIDVRVAKSEKVFPMIAPGKGLHEMVGVKP

SEQ ID NO: 197 - DNA, 438 bp, Bacillus amyloliquefaciens
atgaaaacaaaagaattagtcattatggccctgtttgcggcaatcggagcggtgcttcattccattatgccgccggtattattcggaatgaaacccgatatgatgcttgtgatgatgtttatgggtattctgttatttccccgtgtgcagaacgtgctgatgatcgggattgtaacgggaatcatttccgcactcacgacatcttttccgggcggacagcttccgaatatcattgaaaaaccggtaacggcgtttctgtttctcgcgctggcgcttttggtgaaaaagagcgtgaaaacagcggccgccgccgtcattacaatagccggcaccttcatctccggtttgctctttctggcgctggcccttctgattgtcggcctgccgggggattcaccgccttggtgctcgcggtcgtccttccggcggctgcgctga

SEQ ID NO: 198 - protein, 145 aa, Bacillus amyloliquefaciens
MKTKELVIMALFAAIGAVLHSIMPPVLFGMKPDMMLVMMFMGILLFPRVQNVLMIGIVTGIISALTTSFPGGQLPNIIEKPVTAFLFLALALLVKKSVKTAAAAVITIAGTFISGLLFLALALLIVGLPGDSPPWCSRSSFRRLR

SEQ ID NO: 199 - DNA, 924 bp, Bacillus amyloliquefaciens
atgaacgaaaaaaaagagaaaatcataaaaacaggcatccatttatttgccaaaaaagggttttcttcaacaaccattcaggaaatcgccggtgaatgcggaatttcaaaaggggccttctatcttcattttaaatcaaaagaagaccttttgctctcagcatgtgagtattacatcggcatgtctatggaagaaataaagaaaatcaaaacagaacatcagcataaatcgcctaaggacgtattccgaaaacaaatcgcttatcaattccaggaatttatggagcacaaggactttatcattctcttgctgagcgaaaaggtcattcctgaaaatcaaaaggtcaaacagtattttcatgaggccaatattcaatttaacatactgtaccgggatgctttgctctccgtttacagagatgccgtcataccgtttatagcggatgcgtccgttatggcgcaaggaatagtgagctcctatattcatttcttgatttttaatgaacatacggcattccggacggaaaacgtggcggcctttctgattgccagaatcgatgacctgattacgggactgataagagacaatcccgatccgctgctgccgcaggatatcttcactcagccggcggcggacagagaaagactgcttgcggatattcaaaagataaaagcacagcagggctgcctgaggacgtcctcgtatcgcttgaagtcattgaagaggaatacgcaaaggaagagccgcgaaaaccgattattaaaggaatgctgtccaacttggcaggcagcggaaatgagcagattgaaacgctgcgggcttccattgaaacctatttcagcttataaaaaaagagaccggcgcttaccggtctccgtgtcagcagcgcccttagaggcggctgctttttttatcgttttttga

SEQ ID NO: 200 - protein, 307 aa, Bacillus amyloliquefaciens
MNEKKEKIIKTGIHLFAKKGFSSTTIQEIAGECGISKGAFYLHFKSKEDLLLSACEYYIGMSMEEIKKIKTEHQHKSPKDVFRKQIAYQFQEFMEHKDFIILLLSEKVIPENQKVKQYFHEANIQFNILYRDALLSVYRDAVIPFIADASVMAQGIVSSYIHFLIFNEHTAFRTENVAAFLIARIDDLITGLIRDNPDPLLPQDIFTQPAADRERLLADIQKIKAQQGCLRTSSYRLKSLKRNTQRKSRENRLLKECCPTWQAAEMSRLKRCGLPLKPISAYKKRDRRLPVSVSAAPLEAAAFFIVF

SEQ ID NO: 201 - DNA, 525 bp, Bacillus amyloliquefaciens
atgacaccatttacgattacggaggagaaggcgggggcattccgggtcacctccgcccggaaggatgatgaagaagaagtcatggatctgctcgtgcaggcggcagaatggcttcgcgataaagggtcgaaccagtggagcggccttctgcaaggggaagatacccacaatatgcgggaggcgatcgccaaagggtatgtttttttattcaggcagaatgaagagctggccggcgtcgtcatgctgcttcccgaagcaagcgggtgggacagacgtctatggggcgatgaaggacatgaggagtccgtatatctccaccggctggcgattaacaggcggtttgcaggggcggggctcggccggacgatcatgacttgggcggagacggggtgtcttgtcctggaaaaacgaaaatccggctcgactgcgtgtccggaaacaaggcgcttcagtcgttttacagcggaatgggttacgaatcaaaaggactcgcgccgggttatcatttgtttgaaaaaaaggtga

SEQ ID NO: 202 - protein, 174 aa, Bacillus amyloliquefaciens
MTPFTITEEKAGAFRVTSARKDDEEEVMDLLVQAAEWLRDKGSNQWSGLLQGEDTHNMREAIAKGYVFLFRQNEELAGVVMLLPEASGWDRRLWGDEGHEESVYLHRLAINRRFAGAGLGRTIMTWAETGCLVLEKRKSGSTACPETRRFSRFTAEWVTNQKDSRRVIICLKKR

SEQ ID NO: 203 - DNA, 861 bp, Bacillus amyloliquefaciens
atgattgcccttcatttcggagcgggaaacatcgggcggggctttatcggcgccctgctccatcattccggctatgacgtagttttcgctgatgtgaatgaaacgatggtcagccttctcaatgaaaagaaggaatataccgtggagcttgccgacggcggcaggcagacagaaatcatcggccccgtttcagccatcaacagcgcggtgcaagaacaagagctgtacgggctgatcaatgaagcggcgatcattacgacggcggtgggcccgaacgttctcagactcatcgccccgtccatcgcggaaggtctgaagcgcagaacgtcctctgagcctctcaatatcattgcctgtgaaaatatgatcggcggcagcagttttctgaaaaaagaagttttcggacatttgacggaagcggagcgggaactcgtgaaccggacagtcggcttcccggattctgcggtagatcggatcgtgccgattcagcaccatgaagatccgctgaaagtatccgtagaaccgttttttgaatgggtcatagacagaaccggctttgccggcgatcagccggtacttaaaggcgcgttgtttacggatgatcttacgcctttcattgagagaaagctgtttaccgtcaataccgggcatgccgtcacggcgtatgtcggctatcagcgcggattaaaaaccgtcaaagaggccatcggccatccggaaatccggcgtgtcgtgtacgatgcactttcagaaacgggcgagtacttggtgaaagcgtacggctttaagcaagccgaacacgagcagtacatgaaaaaatcatcagccgctttgataatgaatacatcacggatgatgtga

SEQ ID NO: 204 - protein, 286 aa, Bacillus amyloliquefaciens
MIALHFGAGNIGRGFIGALLHHSGYDVVFADVNETMVSLLNEKKEYTVELADGGRQTEIIGPVSAINSAVQEQELYGLINEAAIITTAVGPNVLRLIAPSIAEGLKRRTSSEPLNIIACENMIGGSSFLKKEVFGHLTEAERELVNRTVGFPDSAVDRIVPIQHHEDPLKVSVEPFFEWVIDRTGFAGDQPVLKGALFTDDLTPFIERKLFTVNTGHAVTAYVGYQRGLKTVKEAIGHPEIRRVVYDALSETGEYLVKAYGFKQAEHEQYMKKSSAALIMNTSRMM

SEQ ID NO: 205 - DNA, 90 bp, Bacillus amyloliquefaciens
atgtacctgtttttttattccataaaaaatctcagaatcgaaataaaatcattgactttatataaaaagaaagtaacatactatttgtaa

SEQ ID NO: 206 - protein, 29 aa, Bacillus amyloliquefaciens
MYLFFYSIKNLRIEIKSLTLYKKKVTYYL

SEQ ID NO: 207 - DNA, 591 bp, Bacillus subtilis
gtgacgagagaaaaaaatccgctgcccatcacgttttatcaaaaaaccgctcttgagcttgccccatcgcttctgggctgccttcttgtaaaagaaacagacgaaggcacagcgtcaggctatattgtggaaacagaggcctatatgggggctggagacagagcggcccacagctttaacaaccgccggacgaagcggactgagatcatgtttgcagaagctgggcgggtatatacatacgtgatgcacacccatacattgctgaatgtcgttgcggcggaagaggatgtcccgcaagcagtattaatcagggcgattgagccgcatgaaggccagctgttaatggaggagagaaggccgggcaggagtccgagggaatggacaaacggaccaggaaagctgacgaaagcgcttggcgtcacgatgaatgactacggacgctggatcacggaacagccgctttacatcgaaagcgggtacacaccggaagcaatttcaaccggcccgcgcatcggcattgacaacagcggggaggcacgcgattatccatggcgtttctgggtgacgggaaacaggtacgtgtcgcgttag

SEQ ID NO: 208 - protein, 196 aa, Bacillus subtilis
MTREKNPLPITFYQKTALELAPSLLGCLLVKETDEGTASGYIVETEAYMGAGDRAAHSFNNRRTKRTEIMFAEAGRVYTYVMHTHTLLNVVAAEEDVPQAVLIRAIEPHEGQLLMEERRPGRSPREWTNGPGKLTKALGVTMNDYGRWITEQPLYIESGYTPEAISTGPRIGIDNSGEARDYPWRFWVTGNRYVSR

SEQ ID NO: 209 - DNA, 1191 bp, Bacillus subtilis
atggcagagagtcttcttatcaaagacattgcgatcgtgacagaaaatgaagtaatcaaaaacggctatgtcggaatcaatgacggaaaaatcagcacagtctcaacagaacggcccaaggagtcatattcaaaagaaattcaagcacctgcgaattccgttttgcttcccggcatgattgacattcatatccacggcggctatggtgcagatacgatggatgcaagcttttctgcgctcgacatcatgtcgtcaagactgcccgaagaaggcacgacgagctttttagccacaacgattacccaagagcatgggaacatttctcaagctttggtgaacgcaagagagtggaaagcggctgaagagtcctctttattaggtgcagaactgctcggcattcatttagagggcccctttgtttcgcttaaaagagccggagcgcagccaaaggagtggattaggccttcggatgttgcgcttttcaaaaagtggcagcaggaggcaggcggactgatcaaaattgttacacttgcgccggaggaggatcagcattttgaactgatccgccatttgaaagacgaatcgattatcgcatccatggggcacacggatgccgattccgcattgctgtcggatgccgcaaaagcaggggcgagccatatgacccatctgtacaacgcgatgagcccgtttcatcaccgagagcccggagtgatcggaacggcgctggcccatgatgggtttgtgacagagcttatcgccgatagcattcactcccaccctttagctgcaaagcttgcttttttggcgaaaggcagcagcaagctcattttaattaccgattccatgagggcaaaaggcctgaaagacggcgtatatgagttcggcggccaaagtgtgacggtaagaggacgaacagctcttctttcagacggaacccttgccggttcgatcctcaaaatgaacgaaggcgcacggcatatgcgtgagtttacaaattgctcttggacggatatagctaatataacttctgcaaacgcggccaaacagctgggcatctttgaccgaaaaggcagtgtgactgtgggaaaagatgcagatttggtgattgtcagcagtgattgcgaggtgattctcaccatttgccgcggaaacattgcatttatatccaaggaggctgaccagatatga

SEQ ID NO: 210 - protein, 396 aa, Bacillus subtilis
MAESLLIKDIAIVTENEVIKNGYVGINDGKISTVSTERPKESYSKEIQAPANSVLLPGMIDIHIHGGYGADTMDASFSALDIMSSRLPEEGTTSFLATTITQEHGNISQALVNAREWKAAEESSLLGAELLGIHLEGPFVSLKRAGAQPKEWIRPSDVALFKKWQQEAGGLIKIVTLAPEEDQHFELIRHLKDESIIASMGHTDADSALLSDAAKAGASHMTHLYNAMSPFHHREPGVIGTALAHDGFVTELIADSIHSHPLAAKLAFLAKGSSKLILITDSMRAKGLKDGVYEFGGQSVTVRGRTALLSDGTLAGSILKMNEGARHMREFTNCSWTDIANITSANAAKQLGIFDRKGSVTVGKDADLVIVSSDCEVILTICRGNIAFISKEADQI

SEQ ID NO: 211 - DNA, 1974 bp, Bacillus subtilis
atgaaaaagctgataaccgcagacgacatcacagcgattgtctctgtgaccgatcctcaatacgccccagacggcacccgtgccgcatatgtaaaatcacaagtgaatcaagagaaagattcgtatacatcaaatatatggatctatgaaacgaaaacgggcgggtctgttccttggacacatggagaaaagcgaagcaccgacccaagatggtctccggacgggtgcacgcttgcctttatttctgatcgagaaggcgatgcggcacagctgtatatgatgagcgctgaaggcggagaagcgagaaaactgactgatatcccgtatggcgtgtcaaagccaatatggtccccggatggcgaatcgattctggtcactgtcagtttgggagagggagaaaacattgatgaccgagaaaaaacagagcaggacagctatgaacctgttgaagtgcaaggcctctcctacaaacgggacggcaaagggctgacgagaggtgcgtatgcccagcttgtgcttgtcagcgtaaagtcgggtgagatggaagagctgacaagtcacaaagctgatcatggtgatcctgctttttctcctgacggcaaatggcttgttttctcagctaatttaactgaaacagatgatgccagcaagccgcatgatgtttacataatgtcactggagtctggagatcttaagcaggttacacctcatcgcggctcattcggatcaagctcattttcaccagacggaaggtatcttgctttgcttggaaatgaaaaggaatataagaatgctacgctctcaaaggcgtggctctatgatatcgaacaaggccgcctcacatgtcttactgagatgctggacgttcatttagcggatgcgctgattggagattcattgatcggtggtgctgaacagcgcccgatttggacaaaggacagccaagggttttatgtcatcggcacagatcaaggcagtacgggcatctattatatttcgattgaaggccttgtgtatccgattcgtctggaaaaagagtacatcaatagcttttctctttcacctgatgaacagcactttattgccagtgtgacaaagccggacagaccgagtgagctttacagtatcccgcttggacaggaagagaaacagctgactggcgcgaatgacaagtttgtcagggagcatacgatatcaatacctgaagagattcaatatgctacagaagacggcgtgatggtgaacggctggctgatgaggcctgcacaaatggaaggtgagacaacatatccacttattcttaacatacacggcggtccgcatatgatgtacggacatacatattttcatgagtttcaggtgctggcggcgaaaggatacgcggtcgtttatatcaatccgagaggaagccacggctacgggcaggaatttgtgaatgcggtcagaggagattatgggggaaaggattatgacgatgtgatgcaggctgtggatgaggctatcaaacgagatccgcatattgatcctaagcggctcggtgtcacgggcggaagctacggaggttttatgaccaactggatcgtcgggcagacgaaccgctttaaagctgccgttacccagcgctcgatatcaaattggatcagctttcacggcgtcagtgatatcggctatttctttacagactggcagcttgagcatgacatgtttgaggacacagaaaagctctgggaccggtctcctttaaaatacgcagcaaacgtggagacaccgcttttgatactgcatggcgagcgggatgaccgatgtccgatcgagcaggcggagcagctgtttatcgctctgaaaaaaatgggcaaggaaaccaagcttgtccgttttccgaatgcatcgcacaatttgtcacgcaccggacacccaagacagcggatcaagcgcctgaattatatcagctcatggtttgaccaatatctctaa

SEQ ID NO: 212 - protein, 657 aa, Bacillus subtilis
MKKLITADDITAIVSVTDPQYAPDGTRAAYVKSQVNQEKDSYTSNIWIYETKTGGSVPWTHGEKRSTDPRWSPDGCTLAFISDREGDAAQLYMMSAEGGEARKLTDIPYGVSKPIWSPDGESILVTVSLGEGENIDDREKTEQDSYEPVEVQGLSYKRDGKGLTRGAYAQLVLVSVKSGEMEELTSHKADHGDPAFSPDGKWLVFSANLTETDDASKPHDVYIMSLESGDLKQVTPHRGSFGSSSFSPDGRYLALLGNEKEYKNATLSKAWLYDIEQGRLTCLTEMLDVHLADALIGDSLIGGAEQRPIWTKDSQGFYVIGTDQGSTGIYYISIEGLVYPIRLEKEYINSFSLSPDEQHFIASVTKPDRPSELYSIPLGQEEKQLTGANDKFVREHTISIPEEIQYATEDGVMVNGWLMRPAQMEGETTYPLILNIHGGPHMMYGHTYFHEFQVLAAKGYAVVYINPRGSHGYGQEFVNAVRGDYGGKDYDDVMQAVDEAIKRDPHIDPKRLGVTGGSYGGFMTNWIVGQTNRFKAAVTQRSISNWISFHGVSDIGYFFTDWQLEHDMFEDTEKLWDRSPLKYAANVETPLLILHGERDDRCPIEQAEQLFIALKKMGKETKLVRFPNASHNLSRTGHPRQRIKRLNYISSWFDQYL

SEQ ID NO: 213 - DNA, 1620 bp, Bacillus subtilis
atgctgaaaggatttacgccttggcctgatgagttagctgagacctatcgaaagaacggctgctgggccggtgagacgtttggagatttgttaagggaccgggcagccaaatatggtgatcgcattgccattacatgcggaaacacccattggagctatcgagagctggacacaagggctgatcgcctggctgccggatttcagaagctcggcattcaacagaaggatcgtgttgtggtgcagctgccaaatatcaaagagttttttgaagttattttcgcgctattccgtctgggggcgcttccagtcttcgcactgccttctcatcgaagcagtgaaattacatatttttgcgagtttgctgaagcggctgcatatatcattcccgacgcatattccggttttgactaccgttcgcttgccagacaggttcaaagcaagctgccgactttgaaaaacatcattgtcgcaggtgaggcagaggaatttttgccgctggaggatttgcatacagaacctgtaaaactgcctgaagtcaaatcttcagatgtggcgttcctccagctttctggcgggagcaccgggctatcgaaactgattccgaggacccacgatgactacatatacagcctgaagcggagtgtggaggtctgctggctcgaccacagcacggtgtacttggccgcgctgccgatggcacacaattatccgctgagctcacctggcgttctcggcgtattatacgctggaggaagagtggtattatctccttctccaagtccagatgacgcatttcctttaattgaacgggaaaaggtcacgataaccgctcttgttccgcctcttgcgatggtatggatggatgcggcatcctcacgccgtgacgatttatccagccttcaagtgttgcaggtcggcggtgccaagtttagtgctgaagccgcgcgcagggtaaaagctgttttcggctgcacgctgcagcaggtgttcggaatggcagagggtctcgtcaattatacgagattggatgatcctgaggagatcattgtcaacacccaaggaaaaccgatgtccccatatgatgaagtgcgtgtttgggatgatcatgatcgcgacgtaaaacctggtgaaacaggccatttgctgacgcggggaccgtatacaattcgaggttactataaggcagaagagcataacgccgcttcatttactgaggacggtttttaccgtacgggtgatatcgtcaggctgacacgagacgggtatattgtcgttgaaggccgggcgaaggatcaaattaaccgtggaggagaaaaggttgcggctgaagaggtggaaaatcatctgctggcgcatccggctgtccatgatgcggcaatggtctccatgcctgatcaatttcttggcgaaagatcttgtgtgttcattattccccgggatgaagccccaaaagccgcagagctcaaagcatttttgagagagcgcggactggcggcatataaaatccctgatcgagttgaatttgtcgaatcctttccgcagacaggggtaggaaaagtcagcaaaaaagcgctccgtgaagccatttccgagaagcttcttgcaggattaaaaaaataa

SEQ ID NO: 214 - protein, 539 aa, Bacillus subtilis
MLKGFTPWPDELAETYRKNGCWAGETFGDLLRDRAAKYGDRIAITCGNTHWSYRELDTRADRLAAGFQKLGIQQKDRVVVQLPNIKEFFEVIFALFRLGALPVFALPSHRSSEITYFCEFAEAAAYIIPDAYSGFDYRSLARQVQSKLPTLKNIIVAGEAEEFLPLEDLHTEPVKLPEVKSSDVAFLQLSGGSTGLSKLIPRTHDDYIYSLKRSVEVCWLDHSTVYLAALPMAHNYPLSSPGVLGVLYAGGRVVLSPSPSPDDAFPLIEREKVTITALVPPLAMVWMDAASSRRDDLSSLQVLQVGGAKFSAEAARRVKAVFGCTLQQVFGMAEGLVNYTRLDDPEEIIVNTQGKPMSPYDEVRVWDDHDRDVKPGETGHLLTRGPYTIRGYYKAEEHNAASFTEDGFYRTGDIVRLTRDGYIVVEGRAKDQINRGGEKVAAEEVENHLLAHPAVHDAAMVSMPDQFLGERSCVFIIPRDEAPKAAELKAFLRERGLAAYKIPDRVEFVESFPQTGVGKVSKKALREAISEKLLAGLKK

SEQ ID NO: 215 - DNA, 1725 bp, Bacillus subtilis
atggggactaatgtacaggtggattcagcatctgccgaatgtacacagacgatgagcggagcattaatgctgattgaatcattaaaaaaagagaaagtagaaatgatcttcggttatccgggcggggctgtgcttccgatttacgataagctatacaattcagggttggtacatatccttccccgtcacgaacaaggagcaattcatgcagcggagggatacgcaagggtctccggaaaaccgggtgtcgtcattgccacgtcagggccgggagcgacaaaccttgttacaggccttgctgatgccatgattgattcattgccgttagtcgtctttacagggcaggtagcaacctctgtaatcgggagcgatgcatttcaggaagcagacattttagggattacgatgccagtaacaaaacacagctaccaggttcgccagccggaagatctgccgcgcatcattaaagaagcgttccatattgcaacaactggaagacccggacctgtattgattgatattccgaaagatgtagcaacaattgaaggagaattcagctacgatcatgagatgaatctcccgggataccagccgacaacagagccgaattatttgcagatccgcaagcttgtggaagccgtgagcagtgcgaaaaaaccggtgatcctggcgggtgcgggcgtactgcacggaaaagcgtcagaagaattaaaaaattatgccgaacagcagcaaatccctgtggcacacacccttttggggctcggaggcttcccggctgaccatccgctttttctagggatggcgggaatgcacggtacttatacagccaatatggcccttcatgaatgtgatctattaatcagtatcggcgcccgttttgatgaccgtgtcacaggaaacctgaaacactttgccagaaacgcaaagatagcccacatcgatattgatccagctgaaatcggaaaaatcatgaaaacacagattcctgtagtcggagacagcaaaattgtcctgcaggagctgatcaaacaagacggcaaacaaagcgattcaagcgaatggaaaaaacagctcgctgaatggaaagaagagtatccgctctggtatgtagataatgaagaagaaggttttaaacctcagaaattgattgaatatattcatcaatttacaaaaggagaggccattgtcgcaacagatgtaggccagcatcaaatgtggtcagcgcaattttatccgttccaaaaagcagataaatgggtcacgtcaggcggacttggaacgatgggattcggtcttccggcggcgatcggcgcacagctggccgaaaaagatgctactgttgtcgcggttgtcggagacggcggattccaaatgacgctccaagaactcgatgttattcgcgaattaaatcttccggtcaaggtagtgattttaaataacgcttgtctcggaatggtcagacagtggcaggaaattttctatgaagaacgttattcagaatctaaattcgcttctcagcctgacttcgtcaaattgtccgaagcatacggcattaaaggcatcagaatttcatcagaagcggaagcaaaggaaaagctggaagaggcattaacatcaagagaacctgttgtcattgatgtgcgggttgccagcgaagaaaaagtattcccgatggtggctccggggaaagggctgcatgaaatggtgggggtgaaaccttga

SEQ ID NO: 216 - protein, 574 aa, Bacillus subtilis
MGTNVQVDSASAECTQTMSGALMLIESLKKEKVEMIFGYPGGAVLPIYDKLYNSGLVHILPRHEQGAIHAAEGYARVSGKPGVVIATSGPGATNLVTGLADAMIDSLPLVVFTGQVATSVIGSDAFQEADILGITMPVTKHSYQVRQPEDLPRIIKEAFHIATTGRPGPVLIDIPKDVATIEGEFSYDHEMNLPGYQPTTEPNYLQIRKLVEAVSSAKKPVILAGAGVLHGKASEELKNYAEQQQIPVAHTLLGLGGFPADHPLFLGMAGMHGTYTANMALHECDLLISIGARFDDRVTGNLKHFARNAKIAHIDIDPAEIGKIMKTQIPVVGDSKIVLQELIKQDGKQSDSSEWKKQLAEWKEEYPLWYVDNEEEGFKPQKLIEYIHQFTKGEAIVATDVGQHQMWSAQFYPFQKADKWVTSGGLGTMGFGLPAAIGAQLAEKDATVVAVVGDGGFQMTLQELDVIRELNLPVKVVILNNACLGMVRQWQEIFYEERYSESKFASQPDFVKLSEAYGIKGIRISSEAEAKEKLEEALTSREPVVIDVRVASEEKVFPMVAPGKGLHEMVGVKP

SEQ ID NO: 217 - DNA, 411 bp, Bacillus subtilis
atgaacagacaagaattaataacagaagctttaaaagcgcgtgatatggcatatgcgccgtattccaaattccaagtaggagccgctcttcttaccaaggatggaaaagtgtacagaggctgcaatattgagaacgcggcatacagcatgtgcaattgcgccgagcgtaccgctttatttaaagctgtttctgaaggggatacagagtttcagatgctggccgttgcggctgacacccctggaccagtatctccgtgcggagcctgccgacaggtgatttctgagctttgcacaaaagacgttattgtcgtactgactaatttacaaggacaaataaaagaaatgactgtggaagaattattgccaggcgcattttcatcggaggatttacatgacgaacgaaagctttaa

SEQ ID NO: 218 - protein, 136 aa, Bacillus subtilis
MNRQELITEALKARDMAYAPYSKFQVGAALLTKDGKVYRGCNIENAAYSMCNCAERTALFKAVSEGDTEFQMLAVAADTPGPVSPCGACRQVISELCTKDVIVVLTNLQGQIKEMTVEELLPGAFSSEDLHDERKL

SEQ ID NO: 219 - DNA, 894 bp, Bacillus subtilis
ttgctgagaataggctcacacgtctctatgagcggaaaacatatgcttctggcagcaagccaggaagcagtctcttatggggcgaatacgtttatgatttatacaggcgcaccgcaaaatacacgccgaaagaaaattgaagacttaaatatagaagcaggccgggcacatatgcaagaaaacggcattgacgagattatcgtacacgcgccttatattattaatattggcaacacgacaaatccgtccacttttgagctgggtgttgattttcttcgttcagaaattgaacggacagcggccatcggagcgaagcaaattgtccttcatcctggcgctcacgtaggggcaggagctgaagccggcatcaaaaaaattattgaaggcttaaatgaagtgattgatccgaatcaaaatgtccagattgcattagaaacaatggctggaaaaggatcagaatgcggcagaagctttgaggagcttgcacagattatcgaaggcgttacacacaatgagcagctgtcagtgtgctttgacacgtgccatacacatgatgccgggtataacattgtcgaagactttgacggagtgctgaatgagttcgataaagtcattggcattgaccgtattaaagtgcttcatatcaatgacagcaaaaatgtcaaaggtgcgagaaaagaccgccatgaaaatattggctttggtgaaataggttttgacgcactgcaatatgttgttcaccatgagcagttaaaagacattccaaaaattcttgaaacaccatatgtcggtgaagataaaaagaacaaaaaaccgccataccgttttgagattgacatgctgaaagaaaaacaatttgatgatacattgctcgaaaagattttacagcaataa

SEQ ID NO: 220 - protein, 297 aa, Bacillus subtilis
MLRIGSHVSMSGKHMLLAASQEAVSYGANTFMIYTGAPQNTRRKKIEDLNIEAGRAHMQENGIDEIIVHAPYIINIGNTTNPSTFELGVDFLRSEIERTAAIGAKQIVLHPGAHVGAGAEAGIKKIIEGLNEVIDPNQNVQIALETMAGKGSECGRSFEELAQIIEGVTHNEQLSVCFDTCHTHDAGYNIVEDFDGVLNEFDKVIGIDRIKVLHINDSKNVKGARKDRHENIGFGEIGFDALQYVVHHEQLKDIPKILETPYVGEDKKNKKPPYRFEIDMLKEKQFDDTLLEKILQQ

SEQ ID NO: 221 - DNA, 828 bp, Bacillus subtilis
ttgttaaaaacatatcaaaaacttttggctatgggtatctttttaatcgtattatgctcgggcaatgctgcatttgcagcgactaatcaggtgggaggcctcagcaacgtaggttttttccacgattatttaatcgaaccgttttccgctctgcttaagggtgttgccgggctgtttcacggagaatacggactctctattatcctcgtaaccattattgtgcgtatggttgtactgcctttgtttgttaatcagttcaaaaaacaacgcgtgttccaagagaaaatggccgttattaaacctcaggttgacagcattcaggccaaattgaaaaaaacgaaggaccctgaaaaacaaaaagagctgcaaatggaaatgatgaagctgtatcaagagaacaacatcaatccgcttgctatgggatgcctcccaatgctgattcagtttcctattgtgattgggttttattacgcgattcgctctacacctgaaattgcgtcacactcgtttttatggttcagtttaggacaatctgacattctcgtgtctcttagcgcgggagcaatgtactttatccaggcctatgtcgctcaaaaactgagcgcgaaatattccgctgtcccgcaaaaccctgcggcacagcaatccgcaaaattgatggtgttcatcttccctgtgatgatgacgattttctcgcttaatgttccggcagcccttccgctgtactggtttacaagcggactgtttttgacagtgcaaaacatcgtccttcagatgacgcatcataaaagtaaaaaaacagccgctcttactgagtcggtgaaataa

SEQ ID NO: 222 - protein, 275 aa, Bacillus subtilis
MLKTYQKLLAMGIFLIVLCSGNAAFAATNQVGGLSNVGFFHDYLIEPFSALLKGVAGLFHGEYGLSIILVTIIVRMVVLPLFVNQFKKQRVFQEKMAVIKPQVDSIQAKLKKTKDPEKQKELQMEMMKLYQENNINPLAMGCLPMLIQFPIVIGFYYAIRSTPEIASHSFLWFSLGQSDILVSLSAGAMYFIQAYVAQKLSAKYSAVPQNPAAQQSAKLMVFIFPVMMTIFSLNVPAALPLYWFTSGLFLTVQNIVLQMTHHKSKKTAALTESVK

SEQ ID NO: 223 - DNA, 2751 bp, Bacillus subtilis
atgtcagatcaatttaacagccgtgaagctcgacgaaaagcgaacagcaaatcgagtccttcaccgaaaaaaggcaagaaacgaaaaaagggcggattgtttaaaaagacccttttcactttactcattctgtttgttttaggcgtagttggcggtgctgttatatttgccgtcatggtttctgatgcgccgtcccttgatgaaagcaaattgaagacgccttattcatcaacgatttatgataaaaatggaaaagagatcgccgaagtcggcgccgaaaaacggacctacgtctcgatagatgaaattcccgatgttgtaaaagaagcctttatcgcgacagaagacgctcgtttttatgagcaccacgggattgaccctgtccgtatcggcggtgcattagttgccaactttaaagacggcttcggggctgaaggcggaagtacgatcacccagcaggtcgtcaaaaactcccttctttcacatcagaagacgttgaaacggaaggtgcaggaagtatggctttcgattcagctggagcgcaattactctaaagatgaaattttagaaatgtatttaaaccggatttatttttctcctagagcatacggaatcggaaaagcggcggaagaatttttcggcgttacagatttaagcaaattgactgtcgaacaggctgcgacgcttgcaggaatgccgcaaagcccaacagcgtacaacccggtcaaaaacccggataaagcggaaaaacgacgcaacatcgtactcagtctgatgaaaaaacaaggatttatttctgattctcaatataacaaagcgaaaaaagtggcagtgaaagacgaaggcgtcgtgtcacagaaggaatatgaaaaagcaagtacaaacaaatacagcgcatttgttgaagaggttatgaaggaaattgatgaaaaatctgatgtcgatccatctgctgacggattaaagatctatacgacattagatacaaaagcacaagataaactagatgaattaatggacggagacaccgtcggatttactgaaggcatgcagggcggcgttacccttctcgatacgaaaaccggagaagtgcgggcgattggcgccggaagagattctacggttggtggctataattacgcgacccaagctaagcgacagcctggatctaccattaaacctattctcgactacggtccagttattgaaaataaaaaatggtcaacttacgagcaaattgatgactcagcttacacgtattcagatggaacacctattcgagactttgaccgttcctataaaggggtcatgtctatgcgtgaagccctcgcccaatcacgtaacattccggctctaaaagcattccaagcagtcggaaaagatgcagcagttgattttgctaatggactggggctcggattaaataaagaaaaagtgtatgaatcatattctatcggaggattcggagaaggtaatcccggtgtctctactctaactatggctggagcatacagtgcattcggaaataacggaacatataacgaaccgcattttgtgaaatcaatagaatttaatgacggcacgaagcttgacttaacacccaaatcaaaatcagcaatgagcgattatacagccttcatgattacagatatgctgaaaacagctgttaaaacaggtactggacagcttgcacaagttccgggagtggaagttgcaggtaaaacaggtacaacaaactttgatgaagcggatatgcaaaaatacaatatcgcacaaggcggtgtaccagattcttggtttgtaggatatacacctcaatataccgctgctgtttggacaggtgtagattctcaaaataagataggaaaaaaatctttaaataaaacagagcaacagattgcaaagcgcatcttcgcccagctcatcgccgatgtcgatgacggaagcggatcatttgagaaacctgacagcgtagtggaagcctctgtagaaaaaggctcaaaccctgcaaaactggcagggccaaatacgccaagcgataagaagctcacagagtactttgttaaaggcacagctccttctactgtttctaaaacatatgagaaagaagaaaaagaggaaacagctaaactgtctggtttaaacgtgaaatacgataaagacaatcaatctttaacgttaagctggaattacgacggagatgcgacctttgctgttaagcaatctgttgatggcggcagctactcagaaattcaaaacagctctgcaaaagaggcagtcatatcgggtgtgcagccaggatctgtgtacaaattcgaagtaacagccgtcagtgatgatggcaaaagtacagcttccacatcctatgaggtgccaaaagctgaagacgatgaagataaaaaagaccagcaacaaacggatgatgaaaaacaagatgatgagaagactcaggatgatacacaaactgatgattctcaaaaagatgacggtcagacggatcaagatcagacagatgattcaacaaacgatcaagacaaaaaacaagacaatacgaacaccaatccgtccgacaacaataaccaagaccaatcaaacgataacgataacgacaacagtaacaaccaggatacgtcggatggtgattcgaactctggtaagaatgattcaacaggttctgacacgaataaaaataaaacagacacatctaataaaacacaaacaaactcatcatccattgaaaaaacaaattaa

SEQ ID NO: 224 - protein, 916 aa, Bacillus subtilis
MSDQFNSREARRKANSKSSPSPKKGKKRKKGGLFKKTLFTLLILFVLGVVGGAVIFAVMVSDAPSLDESKLKTPYSSTIYDKNGKEIAEVGAEKRTYVSIDEIPDVVKEAFIATEDARFYEHHGIDPVRIGGALVANFKDGFGAEGGSTITQQVVKNSLLSHQKTLKRKVQEVWLSIQLERNYSKDEILEMYLNRIYFSPRAYGIGKAAEEFFGVTDLSKLTVEQAATLAGMPQSPTAYNPVKNPDKAEKRRNIVLSLMKKQGFISDSQYNKAKKVAVKDEGVVSQKEYEKASTNKYSAFVEEVMKEIDEKSDVDPSADGLKIYTTLDTKAQDKLDELMDGDTVGFTEGMQGGVTLLDTKTGEVRAIGAGRDSTVGGYNYATQAKRQPGSTIKPILDYGPVIENKKWSTYEQIDDSAYTYSDGTPIRDFDRSYKGVMSMREALAQSRNIPALKAFQAVGKDAAVDFANGLGLGLNKEKVYESYSIGGFGEGNPGVSTLTMAGAYSAFGNNGTYNEPHFVKSIEFNDGTKLDLTPKSKSAMSDYTAFMITDMLKTAVKTGTGQLAQVPGVEVAGKTGTTNFDEADMQKYNIAQGGVPDSWFVGYTPQYTAAVWTGVDSQNKIGKKSLNKTEQQIAKRIFAQLIADVDDGSGSFEKPDSVVEASVEKGSNPAKLAGPNTPSDKKLTEYFVKGTAPSTVSKTYEKEEKEETAKLSGLNVKYDKDNQSLTLSWNYDGDATFAVKQSVDGGSYSEIQNSSAKEAVISGVQPGSVYKFEVTAVSDDGKSTASTSYEVPKAEDDEDKKDQQQTDDEKQDDEKTQDDTQTDDSQKDDGQTDQDQTDDSTNDQDKKQDNTNTNPSDNNNQDQSNDNDNDNSNNQDTSDGDSNSGKNDSTGSDTNKNKTDTSNKTQTNSSSIEKTN

SEQ ID NO: 225 - DNA, 696 bp, Bacillus subtilis
ttgaggggtttttttgtgacgggaactgatacagaagtggggaaaacggttatatccagcggtcttgctgccttattgaaagaacataatagagatgtcggtgtgtataaaccatttttaagcgggatatcgcgtcatcatccagatagtgatacaagtttgctgaaagacatgtcgcagaccagtctttctcatgaagacattacgccttttgccttcaaagcgccgcttgcaccatacgttgcagggaaacttgagggaaagactgtcaccatggaagaggttttaagccattgggggcggattagagaaaaacatgaatgcttcatcgtagaaggtgcaggcggtatttctgtgccattgggagaggactatttggtcagtcatgtcataaaagcgttgcagcttcccatgattattgtggcacgtcctcaccttggaaccattaatcatacctttttaactgtcaaatatgcagaaagcatggggcttccaattgccggaattatcatcaatggaatcagtgactctcctgatgaagatgaaaaaaccaatcctgagatgattgagcgcttatgcggtgtgccgattttaggggttacgccaaagcttgccaacgtgacgaaagaaacggttctacatatggtaaaagaccatatcaatctatcattactgatgaatcaagtgggggtatga

SEQ ID NO: 226 - protein, 231 aa, Bacillus subtilis
MRGFFVTGTDTEVGKTVISSGLAALLKEHNRDVGVYKPFLSGISRHHPDSDTSLLKDMSQTSLSHEDITPFAFKAPLAPYVAGKLEGKTVTMEEVLSHWGRIREKHECFIVEGAGGISVPLGEDYLVSHVIKALQLPMIIVARPHLGTINHTFLTVKYAESMGLPIAGIIINGISDSPDEDEKTNPEMIERLCGVPILGVTPKLANVTKETVLHMVKDHINLSLLMNQVGV

SEQ ID NO: 227 - DNA, 282 bp, Bacillus subtilis
atgcattacataacggcatgtttaaaaatcatcagtgataaagaccttaatgagataatgaaggaattcaaaaaacttgaggaagaaacgaacaaagaagagggttgtattacattccatgcttatccgcttgagccatcagaacgtaaaataatgctttgggagatttgggaaaacgaagaagctgtgaaaacccatttcacgaaaaaacacacaatagacgttcaaaaacaagaattaacggaagtagaatggttaatgaaaagcaatgtgaatgattga

SEQ ID NO: 228 - protein, 93 aa, Bacillus subtilis
MHYITACLKIISDKDLNEIMKEFKKLEEETNKEEGCITFHAYPLEPSERKIMLWEIWENEEAVKTHFTKKHTIDVQKQELTEVEWLMKSNVND

SEQ ID NO: 229 - DNA, 1413 bp, Bacillus subtilis
atgagtgacggcaaaaaacatgtagtcatcatcggcggcggcattaccggtttagccgccgccttctatatggaaaaagaaatcaaagaaaagaatctgccgcttgagctgacacttgttgaggcaagtccgagagtcggcgggaaaatccagactgtcaagaaagacggctatatcatcgaaagagggccagactcatttctggaacgaaagaaaagcgccccgcagcttgttaaagacttaggtcttgagcatttgcttgtcaacaatgcgaccggacaatcctatgtgcttgtaaaccgcaccctgcatccaatgccgaagggcgctgtaatggggataccgacaaaaattgcgccgtttgtttctacgggtctgttttctttgtctgggaaggccagagctgcaatggatttcatcctgcctgcgagcaaaacaaaggatgatcagtcattgggagaattcttccgcagacgtgtcggagatgaagtggtcgagaacttaatcgagccgcttctatcagggatctacgcaggcgacattgacaagctcagcctgatgtcgacatttccgcaattttaccagacggaacaaaagcatagaagcctgattctcggcatgaaaaaaacaaggcctcaaggctcaggccagcagctgacggcaaaaaaacaagggcagttccagactctgtcaaccggtttgcagacccttgtagaagagatcgaaaagcagttaaagctgacgaaggtgtataaaggcacaaaagtgaccaaactcagccatagcggctctggctattcgctcgaactggataacggcgtcacacttgatgctgattcagtaattgtgactgctccgcataaagcggctgcgggaatgctttctgagcttcctgccatttctcatttgaaaaatatgcactccacatccgtggcaaacgtcgctttaggtttccctgaaggctccgtccaaatggagcatgagggcacgggttttgtcatttcaagaaacagtgactttgcgatcacagcctgtacgtggacgaataaaaaatggccgcacgcagcgccggaaggcaaaacgctgcttcgggcatatgtcggaaaagctggagacgaatccattgtcgatctatcagataatgacattatcaacattgtgttagaagacttaaagaaagtcatgaacataaacggcgagccggaaatgacatgtgtcacccgatggcatgaaagcatgccgcagtaccatgtcggccataagcagcgtatcaaggagctgcgtgaagcacttgcatctgcgtatccgggtgtttatatgacaggcgcttctttcgaaggtgtcggcattcccgactgcattgatcaaggaaaagctgccgtgtctgacgcgcttacctatttattcagctaa

SEQ ID NO: 230 - protein, 470 aa, Bacillus subtilis
MSDGKKHVVIIGGGITGLAAAFYMEKEIKEKNLPLELTLVEASPRVGGKIQTVKKDGYIIERGPDSFLERKKSAPQLVKDLGLEHLLVNNATGQSYVLVNRTLHPMPKGAVMGIPTKIAPFVSTGLFSLSGKARAAMDFILPASKTKDDQSLGEFFRRRVGDEVVENLIEPLLSGIYAGDIDKLSLMSTFPQFYQTEQKHRSLILGMKKTRPQGSGQQLTAKKQGQFQTLSTGLQTLVEEIEKQLKLTKVYKGTKVTKLSHSGSGYSLELDNGVTLDADSVIVTAPHKAAAGMLSELPAISHLKNMHSTSVANVALGFPEGSVQMEHEGTGFVISRNSDFAITACTWTNKKWPHAAPEGKTLLRAYVGKAGDESIVDLSDNDIINIVLEDLKKVMNINGEPEMTCVTRWHESMPQYHVGHKQRIKELREALASAYPGVYMTGASFEGVGIPDCIDQGKAAVSDALTYLFS

SEQ ID NO: 231 - DNA, 519 bp, Bacillus subtilis
atgaaaacaaaagagttagtcattatggctctgtttgccgctatcggcgcagcgcttcattccattattccgccctttttaggcggcatgaaaccagatatgatgctgatcatgatgttcatgggcattctgctgttcccgcgggtgcaaaatgtactcgtcatcgggatcgtgaccggaatcatttccgcgcttacaaccgcgtttccagccggacagatccctaacatcattgataaacccgtatcagcgtttctgttcttctccctgtttctcttgttcagaaagagccggaaaacaggtgcagccgctgtgctgacagtgatcgggaccatcttatcaggaattgtgtttctatcgtcagctttattgatcgtcggtttaccgggcggtttcgccgcattgttcgcggctgttgttctgccggccgctgtgctgaatacaatctcaatgatcattatttatccgattgtgcaaaccattttaaggcgttcaagctttatggaagctgctaaataa

SEQ ID NO: 232 - protein, 172 aa, Bacillus subtilis
MKTKELVIMALFAAIGAALHSIIPPFLGGMKPDMMLIMMFMGILLFPRVQNVLVIGIVTGIISALTTAFPAGQIPNIIDKPVSAFLFFSLFLLFRKSRKTGAAAVLTVIGTILSGIVFLSSALLIVGLPGGFAALFAAVVLPAAVLNTISMIIIYPIVQTILRRSSFMEAAK

SEQ ID NO: 233 - DNA, 768 bp, Bacillus subtilis
atggagtttgttcaatatgcatgtaatggggccgttgcagagattatcctgaatcggcctgatgcccatcacgccctgaatgaacagatgctgtctgaattgaaggaggcagtcgaaatggcggctgcaagcgaggcgctcatcgttctcctgagaggaagcgggaaaggcttttcggccggcggtgatatcaggatgatgacgtcagagcatgaccctgaccaatttaaacggctgatggatacgattgaggctgtcaccctgaatttatatcagatgaagaaagtgacaattgcagccattcatggtgctgctgcgggactgggcctgagtttggcgctttgtacggacattgtgctcgctgaaaaaaacgccgttctcgcgatgaattttatcggcattgggcttgttccggacggcggaggacattatttgctgaagaaaagaatcggtgaagcaaaagcgaaaaaactgatttggagcggaaaaaaactatctgcctcggaagctgccgatatggggcttcttgatgggacatttgccggagaccctgccgaaggcgcaagacccattatcgaaaccctgttggcctcccctcttttggcgatgatcgaaacgaaaggtatttttcaaagcctccaaattgaagaactgaaaaaagtgctatcccttgagcgcagcgcccaagagagaatgagaaggaccaaggatcaccaagaaggaatccgtgcctttttagaaaaacgggagccgaagtttcaagcgtaa

SEQ ID NO: 234 - protein, 255 aa, Bacillus subtilis
MEFVQYACNGAVAEIILNRPDAHHALNEQMLSELKEAVEMAAASEALIVLLRGSGKGFSAGGDIRMMTSEHDPDQFKRLMDTIEAVTLNLYQMKKVTIAAIHGAAAGLGLSLALCTDIVLAEKNAVLAMNFIGIGLVPDGGGHYLLKKRIGEAKAKKLIWSGKKLSASEAADMGLLDGTFAGDPAEGARPIIETLLASPLLAMIETKGIFQSLQIEELKKVLSLERSAQERMRRTKDHQEGIRAFLEKREPKFQA

SEQ ID NO: 235 - DNA, 1098 bp, Bacillus subtilis
atgggtattgcaggaacctttatttttatgatcgtgatcggcgctgccattggagcggtgaccaatcatttagcaattcaaatgctgtttaggccgtataaagcgtactatttgtttgggaaacgagttccttttacgcccgggctgattccaagacggcgagatgaacttgcaaaacaaatgggactgatggtagtcaatcatctcttaacccctgaaggcattaaaaagcggctcgtctctgatgcagccaaaacgcaggctcttcgagtgggggaacagctgattcaaaagctgtcactttctgaagtgacagtaaaagaagcgcttgaaaaagccgggatgaagcgcccagaaaaagctgctgatgcatggatcagcagctggaccgatgataagctgaatgagcttttccgccaatacggggaccaatcgttaaaagagctggtgcctatagaggtgcaggaaaagcttgaggaaaaaattccgatgatttcaggatatatattgtcacggagtgtcagttattttgaaagtgatgaaggaaaaatccgtcttggcaatatgattgatgactttttaaaagagcgcggcatgcttggaagcatggtgcaaatgtttcttggcaattcaagccttgcggatcgcgtgctgccggagctgctgaaattcttgcgcaatgaggaaacaaataaattgctttctgatctcttaaaaaacgaatggggcaagctgagggagtatacgtttaatgaagcagatgaaaaatggaatgcaaaggcgctcattttcagtttgaaacgaagagtgctgcaagcattttcgactgcccctttcttcgacaatacgattggcacgcttaccgtccgctatgaatctgagctgacccagcaaatgctgccggcactgttagacaaattgcttgaagggatttcgtccaaccttgaaagtgtcttaaaacggttgcgtcttgaggaaatcgtcaaggagcaggtggatcagttcccggtggagcgtcttgaagaaatggtgctgtccatttcaaaaaaagaatttaaaatgattacctatttgggggccttctcggcggaattatag

SEQ ID NO: 236 - protein, 365 aa, Bacillus subtilis
MGIAGTFIFMIVIGAAIGAVTNHLAIQMLFRPYKAYYLFGKRVPFTPGLIPRRRDELAKQMGLMVVNHLLTPEGIKKRLVSDAAKTQALRVGEQLIQKLSLSEVTVKEALEKAGMKRPEKAADAWISSWTDDKLNELFRQYGDQSLKELVPIEVQEKLEEKIPMISGYILSRSVSYFESDEGKIRLGNMIDDFLKERGMLGSMVQMFLGNSSLADRVLPELLKFLRNEETNKLLSDLLKNEWGKLREYTFNEADEKWNAKALIFSLKRRVLQAFSTAPFFDNTIGTLTVRYESELTQQMLPALLDKLLEGISSNLESVLKRLRLEEIVKEQVDQFPVERLEEMVLSISKKEFKMITYLGAFSAEL

SEQ ID NO: 237 - DNA, 537 bp, Bacillus subtilis
atgacatcagtcaatctaagctacccaataggagaatacaaggcgagggaatccgtatcgaaggagcaaaaagataaatggattcaagtacttgaagaagtgccggcaaaattgaagcaagctgtagagggcatgacggacagccagcttgacacaccgtaccgggacggtggatggaccgttcggcaagttgttcatcatctggctgacagtcatatgaacagctatattcgttttaaattgagcttgacggaagagacaccggctattcgtccgtatgatgaaaaagcatggtcggagctaaaagactcgaaaacggcagatccgagcggctcactcgcgcttttgcaggagcttcacggaagatggacggctctgctccgcactctgacggatcagcaatttaagcgcggattttatcaccctgatacaaaggagatcattaccctggagaacgcgctcggcctgtatgtctggcactcacatcatcatatcgctcatattacggagctttccagacggatggggtggtcttaa

SEQ ID NO: 238 - protein, 178 aa, Bacillus subtilis
MTSVNLSYPIGEYKARESVSKEQKDKWIQVLEEVPAKLKQAVEGMTDSQLDTPYRDGGWTVRQVVHHLADSHMNSYIRFKLSLTEETPAIRPYDEKAWSELKDSKTADPSGSLALLQELHGRWTALLRTLTDQQFKRGFYHPDTKEIITLENALGLYVWHSHHHIAHITELSRRMGWS

SEQ ID NO: 239 - DNA, 447 bp, Bacillus subtilis
atgacatgggcgatcgtgatgttaattctcatgagtctggtgaaaatcgtattaacctgtcttcctacaggcgtcatagaatggctgctcggcaaatttgaagtgcacgccaagctgagtgacgaaaatgcgagtctctctctagatggaaaacgcctcgagggtgcagagaagcagaaagtgattgatcaatttaacgaagctatcttcctggaaaaatattatatctatccaggtgatgaagagcgttatttacatccggaaaacggcggcacgcctctggtgatagatacaaaaaaaggaaaaaaagacgtgaagctgttcgtgtaccgctacgacgaccatatcgacgtcgtgaaacagtacaagaagaaagtgatcgcgtatcgagtgctttctgaaagccttcaaaaagagtctctgtcagtggcgggaagtttagcttaa

SEQ ID NO: 240 - protein, 148 aa, Bacillus subtilis
MTWAIVMLILMSLVKIVLTCLPTGVIEWLLGKFEVHAKLSDENASLSLDGKRLEGAEKQKVIDQFNEAIFLEKYYIYPGDEERYLHPENGGTPLVIDTKKGKKDVKLFVYRYDDHIDVVKQYKKKVIAYRVLSESLQKESLSVAGSLA

SEQ ID NO: 241 - DNA, 543 bp, Bacillus subtilis
atgtcagcttttaagattgagaacgaaacgattgcagatggattttacgcgtgtccggccgtctatgaggatgcagaatcgattaccgggttgctcgtccgaacagctgaatggctccgggatcggggttctaaccaatggagcggacttctcaaagggcaagatatacatgatatcacggggtcaattgaaaagggacatgtgtttgtgtttaaaaaagatgaagagcttgcggctgtcgtgatgctgctgcctgcaccgagcgagtgggaccggaagctttggggagacgatgggcatgaggagtccatttatttgcatcgcctcgcagtaagccgccggtttgcgggacaggggcttggagcccgcgtccttcagtgggcggagacgggcatacactttccgggaaaaacacggatccggcttgactgtgtcgctgataacgacgccctgcattccttttatcggcgtatgggatatgaattcatgggtgctgatgcgtccggatatcatttgtttgagaaagagattacggcagaataa

SEQ ID NO: 242 - protein, 180 aa, Bacillus subtilis
MSAFKIENETIADGFYACPAVYEDAESITGLLVRTAEWLRDRGSNQWSGLLKGQDIHDITGSIEKGHVFVFKKDEELAAVVMLLPAPSEWDRKLWGDDGHEESIYLHRLAVSRRFAGQGLGARVLQWAETGIHFPGKTRIRLDCVADNDALHSFYRRMGYEFMGADASGYHLFEKEITAE

SEQ ID NO: 243 - DNA, 849 bp, Bacillus subtilis
atgaatgaaaaaaaagagagaatcataaaaaccagcattcgtttatttgcgaaaaaaggattcgcagctacgacgatccaagaaatcgccagtgaatgcggcatttcgaagggcgctttttatttgcacttcaaatcgaaagaagcgctgctgttatctgcctgtgaatattatatcggtatgtctatgaacaaaatgaaaaatatagaagaagatctcgccggaaagccccctaaggaagtgttaaaaaagcaaattggcgctcaatttgaggattttcgcgatcataaagattttatcgttcttttgcttaccgaaaatatcattccggaaaatcaagaaatcaagcaatacttttacaaagtaaccatggagacggataagctgtaccggaacgccttgctggtatcctatggcgaaggaatcgagcggtatgtcgcagatctgtccatcatggcaagaggcattgtgcattcctatatgaacgtgatggtatttaacggtgagcttaatatcgatgcagaagaaatctcagcctttattattgagagactgaatgatcttgtacaggggctgagccgttctgcactcaatccgattgtatcaaaagacattttcaacccgatgcctgcgggaaaagaccagctgcttgaggacattcagaaagtgaaagaaaacagcacgctgcccgaggatatcaccgtgtcacttgatgttatcgaggaagaattgactcaggataaaccgcgcaagccgattattaaaggcatgctgtccaatttgaccggaaccaacgacaaagaagttgaaaggcttcgggccctcatctctgtctttatctcaatttga

SEQ ID NO: 244 - protein, 282 aa, Bacillus subtilis
MNEKKERIIKTSIRLFAKKGFAATTIQEIASECGISKGAFYLHFKSKEALLLSACEYYIGMSMNKMKNIEEDLAGKPPKEVLKKQIGAQFEDFRDHKDFIVLLLTENIIPENQEIKQYFYKVTMETDKLYRNALLVSYGEGIERYVADLSIMARGIVHSYMNVMVFNGELNIDAEEISAFIIERLNDLVQGLSRSALNPIVSKDIFNPMPAGKDQLLEDIQKVKENSTLPEDITVSLDVIEEELTQDKPRKPIIKGMLSNLTGTNDKEVERLRALISVFISI

SEQ ID NO: 245 - DNA, 1563 bp, Bacillus subtilis
atgtctaaacaaggaaattttcaaaaatcaatgtcgctgtttgatctgattttgattgggatgggagccatctttggatcagcgtggctgttcgctgtcagtaatgtcgcttcaaaagcagggccctccggcgctttttcctggatcctcggaggagccattattttgttaatcgggctcgtatatgcggagctcggagccgctctgccccgtaccggaggcatcattcgataccccgtttattcacatggccaccttgtcggctacttaatttcgtttgtcacgattgtcgcttatacaagcttgatttcaattgaagtgacagctgtgcgccagtatgtggcctattggtttcccggcctgaccattaaagggtctgattcgccgaccatttccggctggatcttgcagtttgccctattatgcttgtttttcctgctgaattattggagcgtcaaaaccttcgctaaggcgaatttcatcatatcgatttttaaatatattgtgccgattaccatcattattgtgctgatctttcattttcagccggagaatttatccgttcaaggatttgcaccgtttggatttacaggtattcaggctgcaatctcgacaggcggcgtcatgtttgcgtatctcggcctgcacccgattgtatctgtagcaggtgaagtccaaaatccaaaacgcaatatcccgatcgctttaatcatttgcatcatcgtttcaaccatcatttatactgttttgcaggtcacctttattggtgcaatcccgacagaaacactgaaacatggctggcccgcaattggccgggagttctcattgccgtttaaggatattgcggtcatgctcggattaggctggcttgcaacgcttgtcattttagacgccattctgtctcccggaggaaacgggaatatctttatgaatacgacatcccgccttgtttacgcctgggcgcgtaacggcacattatttggcatattctcaaaggtcaataaagatacggggacaccccgcgcatcgctttggctttcgtttgccctgtccattttctggacacttccctttccttcgtggaatgcgctcgtcaatgtctgttcagtcgcgctcattctttcatatgcgattgcacccatttcttcagctgcgctgagggtcaacgcgaaggacttaaacaggccgttttatttaaagggaatgagcattatcgggccgctttcctttatatttacagcgtttatcgtgtactggtcaggatggaaaacagtctcctggctgctcggttcacaactcgtgatgtttttgatctatctctgtttcagcaaatatacgcctaaagaagatgtcagcctcgctcagcagctgaaatcagcctggtggcttatcgggttttatattatgatgctgatcttttcctacatcggttctttcggacatggtttagggattatcagcaatcccgtcgacctcattttagtcgcgatcggctcacttgcgatttattactgggcaaagtataccgggctcccaaaagccgccattgattacgataaataa

SEQ ID NO: 246 - protein, 520 aa, Bacillus subtilis
MSKQGNFQKSMSLFDLILIGMGAIFGSAWLFAVSNVASKAGPSGAFSWILGGAIILLIGLVYAELGAALPRTGGIIRYPVYSHGHLVGYLISFVTIVAYTSLISIEVTAVRQYVAYWFPGLTIKGSDSPTISGWILQFALLCLFFLLNYWSVKTFAKANFIISIFKYIVPITIIIVLIFHFQPENLSVQGFAPFGFTGIQAAISTGGVMFAYLGLHPIVSVAGEVQNPKRNIPIALIICIIVSTIIYTVLQVTFIGAIPTETLKHGWPAIGREFSLPFKDIAVMLGLGWLATLVILDAILSPGGNGNIFMNTTSRLVYAWARNGTLFGIFSKVNKDTGTPRASLWLSFALSIFWTLPFPSWNALVNVCSVALILSYAIAPISSAALRVNAKDLNRPFYLKGMSIIGPLSFIFTAFIVYWSGWKTVSWLLGSQLVMFLIYLCFSKYTPKEDVSLAQQLKSAWWLIGFYIMMLIFSYIGSFGHGLGIISNPVDLILVAIGSLAIYYWAKYTGLPKAAIDYDK

SEQ ID NO: 247 - DNA, 1644 bp, Bacillus subtilis
atgaaagagatcgtaacattaacaaacgttagctatgaagtgaaggatctgactgtttttaaaaatataaatgccagtgttcagcaaggagatatcattgggattatcggcaaaaacggcgctgggaaatctacgctgctgcacctcattcacaatgacttagccccttcccagggtcaaatccttcgaaaggatataaaactggctttggttgaacaggaaacagcggcatattcctttgcggatcagacacctgccgaaaagaagttactggagaaatggcatgtgcctcttcgtgattttcatcagttaagcggcggtgaaaaactaaaagcgcggctggcgaaaggactatcagaggatgcagatctgctgctgttagatgaaccgacaaaccaccttgatgaaaaaagcttgcaatttctcatccaacagctgaaacattataacggcactgtgattctcgtttctcacgatcgatattttttagacgaagccgcaacaaaaatatggtcgcttgaggatcagacgctgattgaattcaaagggaattactccgggtatatgaagttccgggagaagaaaagactcacccagcagcgtgaatatgaaaagcagcaaaaaatggttgaacggattgaagcacaaatgaatgagctcgcttcttggtcggaaaaagcccatgctcaatcgacgaaaaaggaagggtttaaagaatatcaccgggtaaaagcgaagcgtacggatgcccagataaaatccaagcagaagcggcttgaaaaagagcttgaaaaagcaaaggcggaacccgttaccccagaatatacagtccgcttttcaatcgatacaacccacaaaacagggaaacggtttttagaagttcagaatgtaacaaaagcgtttggagaaaggactctctttaaaaacgcaaactttacaattcagcacggcgaaaaggttgcgatcataggccccaatggcagcggaaaaacgacattgctgaatatcattcttggacaggaaacagcagaaggaagcgtatgggtgtcgccgtccgcaaacatcggctatttaacgcaggaggtgtttgatttgcctttagaacaaacaccggaagagttatttgagaatgaaacattcaaagcaagggggcacgttcaaaatctgatgaggcacttaggttttacagccgaccaatggactgaaccgatcaagcatatgagtatgggtgagcgtgtaaagatcaagctgatggcatatattctggaggaaaaagacgtgctgattttagatgagccgacaaaccatctcgacctgccgtcacgcgaacagctggaagaaacactgtcacaatacagcggcacattgctggcggtttcacatgaccgatactttctcgaaaaaacaacaaacagtaaactcgtcatctcaaacaacggcatcgaaaagcagttaaacgacgctccttcagaaagaaatgagcgggaggagcttcggttaaagcttgagacagaaagacaagaagtgctgggaaagctcagttttatgacgccaaatgataaagggtataaggagcttgatcaggctttcaatgagcttacgaaacgaataaaagagctggatcatcaagacaaaaaagactga

SEQ ID NO: 248 - protein, 547 aa, Bacillus subtilis
MKEIVTLTNVSYEVKDLTVFKNINASVQQGDIIGIIGKNGAGKSTLLHLIHNDLAPSQGQILRKDIKLALVEQETAAYSFADQTPAEKKLLEKWHVPLRDFHQLSGGEKLKARLAKGLSEDADLLLLDEPTNHLDEKSLQFLIQQLKHYNGTVILVSHDRYFLDEAATKIWSLEDQTLIEFKGNYSGYMKFREKKRLTQQREYEKQQKMVERIEAQMNELASWSEKAHAQSTKKEGFKEYHRVKAKRTDAQIKSKQKRLEKELEKAKAEPVTPEYTVRFSIDTTHKTGKRFLEVQNVTKAFGERTLFKNANFTIQHGEKVAIIGPNGSGKTTLLNIILGQETAEGSVWVSPSANIGYLTQEVFDLPLEQTPEELFENETFKARGHVQNLMRHLGFTADQWTEPIKHMSMGERVKIKLMAYILEEKDVLILDEPTNHLDLPSREQLEETLSQYSGTLLAVSHDRYFLEKTTNSKLVISNNGIEKQLNDAPSERNEREELRLKLETERQEVLGKLSFMTPNDKGYKELDQAFNELTKRIKELDHQDKKD

SEQ ID NO: 249 - DNA, 246 bp, Bacillus subtilis
ttgtttcggatttttaaaatgtcttttgcggttatcattattatactggcgcttattgcttttaactatacggaacacacctctgttatccaatcggtcatgctcgtctttcttggtgcggtcatgtttatgcaggggcttgaagaacgcaaaaaagaaaatgacggctcaggcgcttttaatatttataccgccgtttttgtatggtctgtctcccttatcggttttacacttcatattatataa

SEQ ID NO: 250 - protein, 81 aa, Bacillus subtilis
MFRIFKMSFAVIIIILALIAFNYTEHTSVIQSVMLVFLGAVMFMQGLEERKKENDGSGAFNIYTAVFVWSVSLIGFTLHII

SEQ ID NO: 251 - DNA, 1122 bp, Bacillus subtilis
atgatcgccttacatttcggtgcggggaatattgggagagggtttatcggcgcgctgcttcaccactccggctatgatgtggtgtttgcggatgtaaacgacacgatggtcagcctcctcaacgaaaaaaaagaatacacagtagaactggcagaagagggacattcatcagaggtcattggcccggtcagcgcgattaacagcggcagtcagcccgaagagctgtaccggctgatgaatgaggcggcgctcatcacaacagctgtcggcccgaatgtgctgaagctgattgctccatctatcgcagaaggtttaagacggagaaacactgcaaacacactgaatatcattgcctgcgaaaatatgattggcggcagcagcttcttaaagaaagagatatacagccatttaacggaagcagagcagaaatccgtcagtgaaacggtaggttttccgaattctgccgttgaccggatcgtcccgattcagcatcatgaagacccgctgaaagtatcggttgaaccatttttcgaatgggtcattgatgaatcaggctttaaagggaaaacaccagtcataaacggcgcactgtttgttgatgatttaacgccgtacatcgaacggaagctgtttacggtcaataccggacacgcggtcacagcgtatgtcggctatcagcgcggactcaaaacggtcaaagaagcaattgatcatccggaaatccgccgtgttgttcattcggcgctgcttgaaactggtgactatctcgtcaaatcgtatggctttaagcaaactgaacacgaacaatatatcaaaaaaatcatcggccgctttgaaaatcctttcatttcggacgatgtgacccgcgtagcgaggtcacctctcagaaaactgggagaaaatgataggcttgtaggcccggcaaagaaaataaaagagccgaatgcactggcggaaggaattgccgcagccctgcgcttcgatttcaccggtgaccctgaagcggttgaactgcaagcgctgattgaagaaaaaggatacagcggcgtacttcaagaggtgtgcggtattcagtcccatgaaccgttgcacgccatcattttaaagaaacttaatcaataa

SEQ ID NO: 252 - protein, 373 aa, Bacillus subtilis
MIALHFGAGNIGRGFIGALLHHSGYDVVFADVNDTMVSLLNEKKEYTVELAEEGHSSEVIGPVSAINSGSQPEELYRLMNEAALITTAVGPNVLKLIAPSIAEGLRRRNTANTLNIIACENMIGGSSFLKKEIYSHLTEAEQKSVSETVGFPNSAVDRIVPIQHHEDPLKVSVEPFFEWVIDESGFKGKTPVINGALFVDDLTPYIERKLFTVNTGHAVTAYVGYQRGLKTVKEAIDHPEIRRVVHSALLETGDYLVKSYGFKQTEHEQYIKKIIGRFENPFISDDVTRVARSPLRKLGENDRLVGPAKKIKEPNALAEGIAAALRFDFTGDPEAVELQALIEEKGYSGVLQEVCGIQSHEPLHAIILKKLNQ

SEQ ID NO: 253 - DNA, 1353 bp, Bacillus subtilis
atgttctgggtcaaaagcaatttgcaggttttctcccgattccccaaaataaaaagcgaggatgtgatcaacataaaactggaacggtttattgaaaaagacggatatatactggccctcatgctaattacggtgccgctggccggtgaactgaaattttatcccctcaatgaagaattccgggtcagctttggggcaccggtttttttcttctttttatcgttgttgcggcatgtgcccgctgtgctgccgggttttctgactggagcggctgttttcatctttcgcgtctttctggaattatggggcggaggacacaatgggctgactccgattctgtatgatcaagcgtctggctttttcttttatatgacttacgcctgtctgttttccatattaaaggccaatcgtttccgtgaacggccgattatgctcggtttcattgggtttatgattgaagttgtgtcagattgtgtcgagctggctgtgcaatttctcatttttcatacggttgttacgcctgagaaaatcactgacattgcggtgattgcgatttctcacacatttattgtgatgagcttttatagtgtgctgaagctgtatgaaacacaatcgagagaaaaacagacaaggcagcagcacgagcacatgctgatgatcgtttccaatttatatgaagaaacggtgcacctaaaaaagacattgaaaacgacagagaaagtgacaaacgattcgtatcagctctatcgggaaatgaagggcaaggatgttcagctgagcggcagaatcctgagactggccggagagattcatgaagtgaaaaaggacaaccagcggatattcgcagggctttcaaaactgatttcgaatgagagtttgagagattatatgagggcttctgatttgctgcagctcgtgattcgaatgaatgaaaagtacgctgaagcactagggaagcagattgatttttactgctcgatcgagggagagcatgacgaatatcacgtatttatcgtgctttcgatcattaataatctaacagcaaatgcggtagaggctatggatgaagagggaatggtcagcctgaggctccgtaagccaaatgagagtatggtagaattccaggtggaagacaatggccccgggatttccgagaaaatcggagacattgtgtttgacccgggctttacttcaaaatatgacgaatttggcacgccttctacgggtatcggactttcctacgtaaaggaaatcgtgactgagctagaaggggatatcacgtttgataatcagcagcggggagtggtgtttgccatcaggctgcctgtccggcatttgattcagaaagggtga

SEQ ID NO: 254 - protein, 450 aa, Bacillus subtilis
MFWVKSNLQVFSRFPKIKSEDVINIKLERFIEKDGYILALMLITVPLAGELKFYPLNEEFRVSFGAPVFFFFLSLLRHVPAVLPGFLTGAAVFIFRVFLELWGGGHNGLTPILYDQASGFFFYMTYACLFSILKANRFRERPIMLGFIGFMIEVVSDCVELAVQFLIFHTVVTPEKITDIAVIAISHTFIVMSFYSVLKLYETQSREKQTRQQHEHMLMIVSNLYEETVHLKKTLKTTEKVTNDSYQLYREMKGKDVQLSGRILRLAGEIHEVKKDNQRIFAGLSKLISNESLRDYMRASDLLQLVIRMNEKYAEALGKQIDFYCSIEGEHDEYHVFIVLSIINNLTANAVEAMDEEGMVSLRLRKPNESMVEFQVEDNGPGISEKIGDIVFDPGFTSKYDEFGTPSTGIGLSYVKEIVTELEGDITFDNQQRGVVFAIRLPVRHLIQKG

SEQ ID NO: 255 - DNA, 1017 bp, Bacillus subtilis
atgatgaacgacgctttgacgagtttggcatgtagcctcaagccgggtacgacaatcaaaggcaagtggaatggaaacacttatacattgcgtaaacagcttggtaaaggggccaatggaattgtgtatttggcagaagcatcagatggacatgttgccttaaaggtgagtgatgacagcctgtctattacttctgaagtgaatgtcttgaaatctttctcaaaggcccagtccgttacgatggggccttctttttttgatacggatgatgcctatattcccagtaccaatacgaaagtttcattttatgcaatggaatacataaaagggccgctgcttttgaagtatgtcagtgataaaggagcagagtggatacctgtattaatgattcagctgttatccagcttatcggtgcttcaccagcaaggatggatattcggcgatcttaaacctgataatctgatcgtaactggtccgcccgcaaggatccgctgcattgatgtgggcggcacgacaaaggaaggccgggcgataaaagagtatacggagttttatgacagaggctattgggggtatggaacaagaaaggcagagccatcctatgatctgttcgcagttgccatgattatgatcaacagtgtgcataaaaaagaatttaagaaaacgaaccagcccaaagaacagcttaggtctctcatcgaaggaaaccctctgcttcaaaagtataaaaaagtgcttttttcaaccttgaacggagattatcaatccgcagatgaaatgaaaaaggatatgctagacgcggggcaaaaagcagcacaaagaaaacagcctataaaagcatcaccgcagcctgccacacgacatagacagcaaaaaccgcgccaaggaaaaataacgaagacgcgatataccccaaaacagaaaccggctaagtcgggggggttatttgaaacaacgctgatcgtgatcagtgttttagcgctttatttcgcctatattatctttttcttaatctga

SEQ ID NO: 256 - protein, 338 aa, Bacillus subtilis
MMNDALTSLACSLKPGTTIKGKWNGNTYTLRKQLGKGANGIVYLAEASDGHVALKVSDDSLSITSEVNVLKSFSKAQSVTMGPSFFDTDDAYIPSTNTKVSFYAMEYIKGPLLLKYVSDKGAEWIPVLMIQLLSSLSVLHQQGWIFGDLKPDNLIVTGPPARIRCIDVGGTTKEGRAIKEYTEFYDRGYWGYGTRKAEPSYDLFAVAMIMINSVHKKEFKKTNQPKEQLRSLIEGNPLLQKYKKVLFSTLNGDYQSADEMKKDMLDAGQKAAQRKQPIKASPQPATRHRQQKPRQGKITKTRYTPKQKPAKSGGLFETTLIVISVLALYFAYIIFFLI

SEQ ID NO: 257 - DNA, 618 bp, Bacillus subtilis
atgagaagcccctatctgatcggcgtgtttctcgctgccggcaaaagcagaagaatgggtcaaaacaagctggctttgccgctaaaaggagaaaacatcggctcactttccttgaaaactgctctgtcgtcccgccttgatcacgtgctggtcgtcgagcggacagaacatgcctcccttgagtggataggagcgccgtatcacgctccgccttttcaaaaacgctggagcctgcacgtttgccaagacgcagaaaagggtcaggggcattcagtcagcagcggggtgagaaaagcagaaagcatgggggcggacggcgttgtcattttgttagccgaccagcctcagctttccgtcgatcatctcaatgcccttgtggcactggcccctgagccatttgccgtgtcatcgtttttaggggcgttcaccccgccaatctacttctcgtcggcttgttttccttatgtaaaggggttaacgggagatgaaggggctcgcaggctcctgaaaagcggacagcttggagcaggagcggttttggaggcaaaggatagcggcgagttggacgatattgatacacccgaggaatatgacatggtaaggagggcgatggcttga

SEQ ID NO: 258 - protein, 205 aa, Bacillus subtilis
MRSPYLIGVFLAAGKSRRMGQNKLALPLKGENIGSLSLKTALSSRLDHVLVVERTEHASLEWIGAPYHAPPFQKRWSLHVCQDAEKGQGHSVSSGVRKAESMGADGVVILLADQPQLSVDHLNALVALAPEPFAVSSFLGAFTPPIYFSSACFPYVKGLTGDEGARRLLKSGQLGAGAVLEAKDSGELDDIDTPEEYDMVRRAMA

SEQ ID NO: 259 - DNA, 1454 bp, Bacillus amyloliquefaciens
tcggagagtttgatcctggctcaggacgaacgctggcggcgtgcctaatacatgcaagtcgagcggacagatgggagcttgctccctgatgttagcggcggacgggtgagtaacacgtgggtaacctgcctgtaagactgggataactccgggaaaccggggctaataccggatggttgtctgaaccgcatggttcagacataaaaggtggcttcggctaccacttacagatggacccgcggcgcattagctagttggtgaggtaacggctcaccaaggcgacgatgcgtagccgacctgagagggtgatcggccacactgggactgagacacggcccagactcctacgggaggcagcagtagggaatcttccgcaatggacgaaagtctgacggagcaacgccgcgtgagtgatgaaggttttcggatcgtaaagctctgttgttagggaagaacaagtgccgttcaaatagggcggcaccttgacggtacctaaccagaaagccacggctaactacgtgccagcagccgcggtaatacgtaggtggcaagcgttgtccggaattattgggcgtaaagggctcgcaggcggtttcttaagtctgatgtgaaagcccccggctcaaccggggagggtcattggaaactggggaacttgagtgcagaagaggagagtggaattccacgtgtagcggtgaaatgcgtagagatgtggaggaacaccagtggcgaaggcgactctctggtctgtaactgacgctgaggagcgaaagcgtggggagcgaacaggattagataccctggtagtccacgccgtaaacgatgagtgctaagtgttagggggtttccgccccttagtgctgcagctaacgcattaagcactccgcctggggagtacggtcgcaagactgaaactcaaaggaattgacgggggcccgcacaagcggtggagcatgtggtttaattcgaagcaacgcgaagaaccttaccaggtcttgacatcctctgacaatcctagagataggacgtccccttcgggggcagagtgacaggtggtgcatggttgtcgtcagctcgtgtcgtgagatgttgggttaagtcccgcaacgagcgcaacccttgatcttagttgccagcattcagttgggcactctaaggtgactgccggtgacaaaccggaggaaggtggggatgacgtcaaatcatcatgccccttatgacctgggctacacacgtgctacaatggacagaacaaagggcagcgaaaccgcgaggttaagccaatcccacaaatctgttctcagttcggatcgcagtctgcaactcgactgcgtgaagctggaatcgctagtaatcgcggatcagcatgccgcggtgaatacgttcccgggccttgtacacaccgcccgtcacaccacgagagtttgtaacacccgaagtcggtgaggtaacct

SEQ ID NO: 260 - DNA, 1545 bp, Bacillus amyloliquefaciens
ggagagtttgatcctggctcaggacgaacgctggcggcgtgcctaatacatgcaagtcgagcggacagatgggagcttgctccctgatgttagcggcggacgggtgagtaacacgtgggtaacctgcctgtaagactgggataactccgggaaaccggggctaataccggatggttgtctgaaccgcatggttcagacataaaaggtggcttcggctaccacttacagatggacccgcggcgcattagctagttggtgaggtaacggctcaccaaggcgacgatgcgtagccgacctgagagggtgatcggccacactgggactgagacacggcccagactcctacgggaggcagcagtagggaatcttccgcaatggacgaaagtctgacggagcaacgccgcgtgagtgatgaaggttttcggatcgtaaagctctgttgttagggaagaacaagtgccgttcaaatagggcggcaccttgacggtacctaaccagaaagccacggctaactacgtgccagcagccgcggtaatacgtaggtggcaagcgttgtccggaattattgggcgtaaagggctcgcaggcggtttcttaagtctgatgtgaaagcccccggctcaaccggggagggtcattggaaactggggaacttgagtgcagaagaggagagtggaattccacgtgtagcggtgaaatgcgtagagatgtggaggaacaccagtggcgaaggcgactctctggtctgtaactgacgctgaggagcgaaagcgtggggagcgaacaggattagataccctggtagtccacgccgtaaacgatgagtgctaagtgttagggggtttccgccccttagtgctgcagctaacgcattaagcactccgcctggggagtacggtcgcaagactgaaactcaaaggaattgacgggggcccgcacaagcggtggagcatgtggtttaattcgaagcaacgcgaagaaccttaccaggtcttgacatcctctgacaatcctagagataggacgtccccttcgggggcagagtgacaggtggtgcatggttgtcgtcagctcgtgtcgtgagatgttgggttaagtcccgcaacgagcgcaacccttgatcttagttgccagcattcagttgggcactctaaggtgactgccggtgacaaaccggaggaaggtggggatgacgtcaaatcatcatgccccttatgacctgggctacacacgtgctacaatggacagaacaaagggcagcgaaaccgcgaggttaagccaatcccacaaatctgttctcagttcggatcgcagtctgcaactcgactgcgtgaagctggaatcgctagtaatcgcggatcagcatgccgcggtgaatacgttcccgggccttgtacacaccgcccgtcacaccacgagagtttgtaacacccgaagtcggtgaggtaaccttttaggagccagccgccgaaggtgggacagatgattggggtgaagtcgtaacaaggtagccgtatcggaaggtgcggctggatcacctccttt
